(19) United States
(12) Patent Application Publication
(10) Pub. No.: US 2015/0157700 A1
(43) Pub. Date: Jun. 11, 2015

(54) ADENOVIRAL VECTOR-BASED MALARIA VACCINE

(71) Applicant: GanVec, Inc., Gaithersburg, MD (US)

(72) Inventors: Joseph T. Bruder, Gaithersburg, MD (US); Jason G.D. Gall, Germantown, MD (US); Duncan McVey, Derwood, MD (US); Douglas E. Brough, Gaithersburg, MD (US)

(21) Appl. No.: 14/373,574

(22) PCT Filed: Feb. 1, 2013
(86) PCT No.: PCT/US2013/024262

§ 371 Date: Jul. 21, 2014

Related U.S. Application Data
(60) Provisional application No. 61/593,953, filed on Feb. 2, 2012.
(60) Provisional application No. 61/593,964, filed on Feb. 2, 2012.
(60) Provisional application No. 61/593,980, filed on Feb. 2, 2012.

(51) Int. Cl. A61K 39/015; C12N 7/00

(52) U.S. Cl. CPC A61K 39/015; C12N 7/00; A61K 2039/5256

(57) ABSTRACT

The invention provides an adenovirus or adenoviral vector characterized by comprising a nucleic acid sequence encoding one or more Plasmodium antigens and one or more particular nucleic acid sequences or one or more particular amino acid sequences, or portions thereof, pertaining to, for example, an adenoviral pIX protein, DNA polymerase protein, penton protein, hexon protein, and/or fiber protein, as well as a method of inducing an immune response against Plasmodium falciparum in a mammal by administering the adenovirus or adenoviral vector to the mammal.

### CROSS-REFERENCE TO RELATED APPLICATIONS

[0001] This patent application claims the benefit of U.S. Provisional Patent Application No. 61/593,953, filed Feb. 2, 2012, U.S. Provisional Patent Application No. 61/593,964, filed Feb. 2, 2012, and U.S. Provisional Patent Application No. 61/593,980, filed Feb. 2, 2012, the disclosures of which are incorporated by reference.

### INCORPORATION-BY-REFERENCE OF MATERIAL SUBMITTED ELECTRONICALLY

[0002] Incorporated by reference in its entirety herein is a computer-readable nucleotide/amino acid sequence listing submitted concurrently herewith and identified as follows: One 1,111,510 Byte ASCII (Text) file named “712147_ST25.TXT,” created on Jan. 28, 2013.

### BACKGROUND OF THE INVENTION

[0003] Malaria is one of the most devastating parasitic diseases affecting humans. Indeed, 41% of the world's population lives in areas where malaria is transmitted (e.g., parts of Africa, Asia, the Middle East, Central and South America, Hispaniola, and Oceania). The World Health Organization (WHO) and the Centers for Disease Control (CDC) estimate that malaria infects 300-500 million people and kills 700,000-3 million people annually, with the majority of deaths occurring in children in sub-Saharan Africa. Malaria also is a major health concern to U.S. military personnel deployed to tropical regions of the world. For example, in August 2003, 28% of the 26^{th} Marine Expeditionary Unit and Joint Task Force briefly deployed to Monrovia, Liberia, were infected with the malaria parasite Plasmodium falciparum. In addition, one 157-man Marine Expeditionary Unit sustained a 44% malaria casualty rate over a 12-day period while stationed at Robert International Airport in Monrovia. In all conflicts during the past century conducted in malaria endemic areas, malaria has been the leading cause of casualties, exceeding enemy-inflicted casualties in its impact on “person-days” lost from duty.

[0004] To combat malaria during U.S military operations, preventive drugs, insect repellants, and barriers have been used with some success, but developing drug resistance by the malaria parasite and insecticide resistance by mosquito vectors has limited the efficacy of these agents. Moreover, the logistical burden and side effects associated with the use of these agents often is associated with high non-compliance rates. Vaccines are the most cost effective and efficient therapeutic interventions for infectious diseases. In this regard, vaccination has the advantage of administration prior to military deployment and likely reduction in non-compliance risks. However, decades of research and development directed to a malaria vaccine have not proven successful. Recent efforts have focused on developing vaccines against several specific malaria genes and delivery vector systems including adenovirus, poxvirus, and plasmids. Malaria vaccine development and related clinical trials are reviewed in, for example, Graves and Gelband, Cochrane Database Syst. Rev., 1: CD000129 (2003), Moore et al., Lancet Infect. Dis., 2: 737-743 (2002), Carvalho et al., Scand. J. Immunol., 56: 327-343 (2002), Moorthy and Hill, Br. Med. Bull., 62: 59-72 (2002), Greenwood and Alonso, Chem. Immunol., 80: 366-395 (2002), and Richie and Saul, Nature, 415: 694-701 (2002).

[0005] Over the past 15-20 years, a series of Phase 1/2 vaccine trials have been reported using synthetic peptides or recombinant proteins based on malarial antigens. Most of these trials have been directed against the sporozoite stage or liver stage of the Plasmodium life cycle, where the use of experimental mosquito challenges allows rapid progress through Phase 1 to Phase 2a preliminary efficacy studies. Anti-sporozoite vaccines tested include completely synthetic peptides, conjugates of synthetic peptide with proteins such as tetanus toxoid (to provide T cell help), recombinant malaria proteins, particle-forming recombinant chimeric constructs, recombinant viruses, and bacteria and DNA vaccines. Several trials of asexual blood stage vaccines have used either synthetic peptide conjugates or recombinant proteins. There also has been a single trial of a transmission blocking vaccine (recombinant Pfs25). A recurring problem identified in all of these vaccination strategies is the difficulty in obtaining a sufficiently strong and long lasting immune response in humans, despite the strong immunogenic response in animal models.

[0006] To overcome these limitations, the development of potent immune-stimulatory conjugates or adjuvants to boost the human response has been explored, in addition to the development of vaccines directed against the circumsporozoite protein (CSP), the principal sporozoite coat protein. Anti-CSP vaccines using recombinant proteins, peptide conjugates, recombinant protein conjugates, and chimeric proteins have been shown to elicit anti-CSP antibodies. Although considerable efforts are still being directed at the development of protein-based vaccines, alternative technologies such as DNA and viral based vaccines have shown some promise with regard to immunogenicity and protective efficacy, at least in animal models.

[0007] In this regard, DNA vaccines encoding Plasmodium antigens have been developed and can induce CD8+ CTL and IFN-γ responses, as well as protection against sporozoite challenge in mice (see Sedegah et al., Proc. Natl. Acad. Sci. USA, 91: 9866-9870 (1994), and Doolan et al., J. Exp. Med., 183: 1739-1746 (1996)) and monkeys (Wang et al., Science, 282: 476-480 (1998), Rogers et al., Infect. Immun., 69: 5565-5572 (2001), and Rogers et al., Infect. Immun., 70: 4329-4335 (2002)). Furthermore, Phase I and Phase 2a clinical trials have established the safety, tolerability, and immunogenicity of DNA vaccines encoding malaria antigens in normal healthy humans (see, e.g., Wang et al., Infect Immun., 66: 4193-41202 (1998), Le et al., Vaccine, 18: 1893-1901 (2000), and Epstein et al., Hum. Gene Ther., 13: 1551-1560 (2002)). However, the immunogenicity of first and second-generation DNA vaccines in nonhuman primates and in humans has been suboptimal. Even in murine models, DNA vaccines are not effective at activating both arms of the immune system (see, e.g., Doolan et al., supra, Sedegah et al., supra, Sedegah et al., Proc. Natl. Acad. Sci. USA, 95: 7648-7653 (1998), Zavala et al., Virology, 280: 155-159 (2001), and Pardoll, Nat. Rev. Immunol, 2: 227-238 (2002)).

[0008] Thus, there remains a need for constructs that can be used in methods to effectively prevent and/or treat malaria. The invention provides such constructs and methods.

### BRIEF SUMMARY OF THE INVENTION

[0009] The invention provides an adenovirus or adenoviral vector. The adenovirus or adenoviral vector comprises (1) a nucleic acid sequence encoding one or more Plasmodium antigens and (2) one or more of the nucleic acid sequences selected from the group consisting of (a) the nucleic acid sequence of SEQ ID NO: 1, (b) a nucleic acid sequence that is at least 98.5% identical to SEQ ID NO: 2, (c) a nucleic acid sequence that is at least 90% identical to SEQ ID NO: 3, (d) a nucleic acid sequence that is at least 80% identical to SEQ ID NO: 4, and (e) a nucleic acid sequence that is at least 89% identical to SEQ ID NO: 5.

[0010] The invention provides an adenovirus or adenoviral vector comprising (1) a nucleic acid sequence encoding one or more Plasmodium antigens and (2) one or more of the nucleic acid sequences selected from the group consisting of (a) a nucleic acid sequence that is at least 98.6% identical to SEQ ID NO: 6, (b) a nucleic acid sequence that is at least 99.06% identical to SEQ ID NO: 7, (c) a nucleic acid sequence that is at least 97.13% identical to SEQ ID NO: 8, (d) a nucleic acid sequence that is at least 90.7% identical to SEQ ID NO: 9, and (e) a nucleic acid sequence that is at least 96.6% identical to SEQ ID NO: 10.

[0011] The invention provides an adenovirus or adenoviral vector comprising (1) a nucleic acid sequence encoding one or more Plasmodium antigens and (2) one or more of the nucleic acid sequences selected from the group consisting of (a) a nucleic acid sequence comprising at least 121 contiguous nucleotides of SEQ ID NO: 6, (b) a nucleic acid sequence comprising at least 462 contiguous nucleotides of SEQ ID NO: 7, (c) a nucleic acid sequence comprising at least 234 contiguous nucleotides of SEQ ID NO: 8, (d) a nucleic acid sequence comprising at least 606 contiguous nucleotides of SEQ ID NO: 9, and (e) a nucleic acid sequence comprising at least 188 contiguous nucleotides of SEQ ID NO: 10.

[0012] The invention provides an adenovirus or adenoviral vector comprising (1) a nucleic acid sequence encoding one or more Plasmodium antigens and (2) one or more of the amino acid sequences selected from the group consisting of (a) the amino acid sequence of SEQ ID NO: 11, (b) an amino acid sequence that is at least 82% identical to SEQ ID NO: 13, (c) an amino acid sequence that is at least 80% identical to SEQ ID NO: 14, and (d) an amino acid sequence that is at least 83% identical to SEQ ID NO: 15.

[0013] The invention provides an adenovirus or adenoviral vector comprising (1) a nucleic acid sequence encoding one or more Plasmodium antigens and (2) one or more of the nucleic acid sequences selected from the group consisting of (a) a nucleic acid sequence encoding the amino acid sequence of SEQ ID NO: 11, (b) a nucleic acid sequence encoding an amino acid sequence that is at least 99% identical to SEQ ID NO: 12, (c) a nucleic acid sequence encoding an amino acid sequence that is at least 82% identical to SEQ ID NO: 13, (d) a nucleic acid sequence encoding an amino acid sequence that is at least 80% identical to SEQ ID NO: 14, and (e) a nucleic acid sequence encoding an amino acid sequence that is at least 83% identical to SEQ ID NO: 15.

[0014] The invention provides an adenovirus or adenoviral vector comprising (1) a nucleic acid sequence encoding one or more Plasmodium antigens and (2) one or more of the amino acid sequences selected from the group consisting of (a) the amino acid sequence of SEQ ID NO: 16, (b) an amino acid sequence that is at least 97.8% identical to SEQ ID NO: 18, (c) an amino acid that is at least 93.4% identical to SEQ ID NO: 19, and (d) an amino acid sequence that is at least 98.2% identical to SEQ ID NO: 20.

[0015] The invention provides an adenovirus or adenoviral vector comprising (1) a nucleic acid sequence encoding one or more Plasmodium antigens and (2) one or more of the nucleic acid sequences selected from the group consisting of (a) a nucleic acid sequence encoding the amino acid sequence of SEQ ID NO: 16, (b) a nucleic acid sequence encoding an amino acid sequence that is at least 99.78% identical to SEQ ID NO: 17, (c) a nucleic acid sequence encoding an amino acid sequence that is at least 97.8% identical to SEQ ID NO: 18, (d) a nucleic acid sequence encoding an amino acid that is at least 93.4% identical to SEQ ID NO: 19, and (e) a nucleic acid sequence encoding an amino acid sequence that is at least 98.2% identical to SEQ ID NO: 20.

[0016] The invention provides an adenovirus or adenoviral vector comprising (1) a nucleic acid sequence encoding one or more Plasmodium antigens and (2) one or more of the amino acid sequences selected from the group consisting of (a) an amino acid sequence comprising at least 89 contiguous amino acid residues of SEQ ID NO: 16, (b) an amino acid sequence comprising at least 247 contiguous amino acid residues of SEQ ID NO: 18, (c) an amino acid sequence comprising at least 370 contiguous amino acid residues of SEQ ID NO: 19, and (d) an amino acid sequence comprising at least 192 contiguous amino acid residues of SEQ ID NO: 20.

[0017] The invention provides an adenovirus or adenoviral vector comprising (1) a nucleic acid sequence encoding one or more Plasmodium antigens and (2) one or more of the nucleic acid sequences selected from the group consisting of (a) a nucleic acid sequence encoding an amino acid sequence comprising at least 89 contiguous amino acid residues of SEQ ID NO: 16, (b) a nucleic acid sequence encoding an amino acid sequence comprising at least 428 contiguous amino acid residues of SEQ ID NO: 17, (c) a nucleic acid sequence encoding an amino acid sequence comprising at least 247 contiguous amino acid residues of SEQ ID NO: 18, (d) a nucleic acid sequence encoding an amino acid sequence comprising at least 370 contiguous amino acid residues of SEQ ID NO: 19, and (e) a nucleic acid sequence encoding an amino acid sequence comprising at least 192 contiguous amino acid residues of SEQ ID NO: 20.

[0018] The invention provides an adenovirus or adenoviral vector comprising (1) a nucleic acid sequence encoding one or more Plasmodium antigens and (2) one or more of the nucleic acid sequences selected from the group consisting of (a) a nucleic acid sequence that is at least 96% identical to SEQ ID NO: 25, (b) a nucleic acid sequence that is at least 99% identical to SEQ ID NO: 26, (c) a nucleic acid sequence that is at least 80% identical to SEQ ID NO: 27, (d) a nucleic acid sequence that is at least 80% identical to SEQ ID NO: 28, and (e) a nucleic acid sequence that is at least 85.4% identical to SEQ ID NO: 29.

[0019] The invention provides an adenovirus or adenoviral vector comprising (1) a nucleic acid sequence encoding one or more Plasmodium antigens and (2) one or more of the nucleic acid sequences selected from the group consisting of (a) a nucleic acid sequence that is at least 98.7% identical to SEQ ID NO: 30, (b) a nucleic acid sequence that is at least 98.9% identical to SEQ ID NO: 31, (c) a nucleic acid sequence that is at least 99.4% identical to SEQ ID NO: 32, (d) a nucleic acid sequence that is at least 99.1% identical to SEQ ID NO: 33, (e) a nucleic acid sequence that is at least 81.25% identical to SEQ ID NO: 34, (f) a nucleic acid sequence that is at least 90.83% identical to SEQ ID NO: 35, and (g) a nucleic acid sequence that is at least 82.5% identical to SEQ ID NO: 36.

[0020] The invention provides an adenovirus or adenoviral vector comprising (1) a nucleic acid sequence encoding one or more Plasmodium antigens and (2) one or more of the nucleic acid sequences selected from the group consisting of (a) a nucleic acid sequence comprising at least 162 contiguous nucleotides of SEQ ID NO: 30, (b) a nucleic acid sequence comprising at least 162 contiguous nucleotides of SEQ ID NO: 31, (c) a nucleic acid sequence comprising at least 121 contiguous nucleotides of SEQ ID NO: 32, (d) a nucleic acid sequence comprising at least 531 contiguous nucleotides of SEQ ID NO: 33, (e) a nucleic acid sequence comprising at least 156 contiguous nucleotides of SEQ ID NO: 34, (f) a nucleic acid sequence comprising at least 192 contiguous nucleotides of SEQ ID NO: 35, and (g) a nucleic acid sequence comprising at least 84 contiguous nucleotides of SEQ ID NO: 36.

[0021] The invention provides an adenovirus or adenoviral vector comprising (1) a nucleic acid sequence encoding one or more Plasmodium antigens and (2) one or more of the amino acid sequences selected from the group consisting of (a) an amino acid sequence that is at least 85% identical to SEQ ID NO: 38, (b) an amino acid sequence that is at least 80% identical to SEQ ID NO: 39, and (c) an amino acid sequence that is at least 80% identical to SEQ ID NO: 40.

[0022] The invention provides an adenovirus or adenoviral vector comprising (1) a nucleic acid sequence encoding one or more Plasmodium antigens and (2) one or more of the nucleic acid sequences selected from the group consisting of (a) a nucleic acid sequence encoding an amino acid sequence that is at least 99.7% identical to SEQ ID NO: 37, (b) a nucleic acid sequence encoding an amino acid sequence that is at least 85% identical to SEQ ID NO: 38, (c) a nucleic acid sequence encoding an amino acid sequence that is at least 80% identical to SEQ ID NO: 39, and (d) a nucleic acid sequence encoding an amino acid sequence that is at least 80% identical to SEQ ID NO: 40.

[0023] The invention provides an adenovirus or adenoviral vector comprising (1) a nucleic acid sequence encoding one or more Plasmodium antigens and (2) one or more of the amino acid sequences selected from the group consisting of (a) an amino acid sequence that is at least 99% identical to SEQ ID NO: 42, (b) an amino acid sequence that is at least 81.4% identical to SEQ ID NO: 44, (c) an amino acid sequence that is at least 91.3% identical to SEQ ID NO: 45, and (d) an amino acid sequence that is at least 83.4% identical to SEQ ID NO: 46.

[0024] The invention provides an adenovirus or adenoviral vector comprising (1) a nucleic acid sequence encoding one or more Plasmodium antigens and (2) one or more of the nucleic acid sequences selected from the group consisting of (a) a nucleic acid sequence encoding an amino acid sequence that is at least 99% identical to SEQ ID NO: 42, (b) a nucleic acid sequence encoding an amino acid sequence that is at least 99.75% identical to SEQ ID NO: 43, (c) a nucleic acid sequence encoding an amino acid sequence that is at least 81.4% identical to SEQ ID NO: 44, (d) a nucleic acid sequence encoding an amino acid sequence that is at least 91.3% identical to SEQ ID NO: 45, (e) a nucleic acid sequence encoding an amino acid sequence that is at least 83.4% identical to SEQ ID NO: 46.

[0025] The invention provides an adenovirus or adenoviral vector comprising (1) a nucleic acid sequence encoding one or more Plasmodium antigens and (2) one or more of the amino acid sequences selected from the group consisting of (a) an amino acid sequence comprising at least 89 contiguous amino acid residues of SEQ ID NO: 42, (b) an amino acid sequence comprising at least 114 contiguous amino acid residues of SEQ ID NO: 44, (c) an amino acid sequence comprising at least 231 contiguous amino acid residues of SEQ ID NO: 45, and (d) an amino acid sequence comprising at least 30 contiguous amino acid residues of SEQ ID NO: 46.

[0026] The invention provides an adenovirus or adenoviral vector comprising (1) a nucleic acid sequence encoding one or more Plasmodium antigens and (2) one or more of the nucleic acid sequences selected from the group consisting of (a) a nucleic acid sequence encoding an amino acid sequence comprising at least 89 contiguous amino acid residues of SEQ ID NO: 42, (b) a nucleic acid sequence encoding an amino acid sequence comprising at least 428 contiguous amino acid residues of SEQ ID NO: 43, (c) a nucleic acid sequence encoding an amino acid sequence comprising at least 114 contiguous amino acid residues of SEQ ID NO: 44, (d) a nucleic acid sequence encoding an amino acid sequence comprising at least 231 contiguous amino acid residues of SEQ ID NO: 45, and (e) a nucleic acid sequence encoding an amino acid sequence comprising at least 30 contiguous amino acid residues of SEQ ID NO: 46.

[0027] The invention provides an adenovirus or adenoviral vector comprising (1) a nucleic acid sequence encoding one or more Plasmodium antigens and (2) one or more of the nucleic acid sequences selected from the group consisting of (a) a nucleic acid sequence that is at least 97% identical to SEQ ID NO: 59, (b) a nucleic acid sequence that is at least 97.5% identical to SEQ ID NO: 60, (c) a nucleic acid sequence that is at least 80% identical to SEQ ID NO: 61, (d) a nucleic acid sequence that is at least 96% identical to SEQ ID NO: 62, and (e) a nucleic acid sequence that is at least 96% identical to SEQ ID NO: 63.

[0028] The invention provides an adenovirus or adenoviral vector comprising (1) a nucleic acid sequence encoding one or more Plasmodium antigens and (2) one or more of the nucleic acid sequences selected from the group consisting of (a) a nucleic acid sequence that is at least 98.4% identical to SEQ ID NO: 64, (b) a nucleic acid sequence that is at least 99.01% identical to SEQ ID NO: 65, (c) a nucleic acid sequence that is at least 97.08% identical to SEQ ID NO: 66, (d) a nucleic acid sequence that is at least 96.52% identical to SEQ ID NO: 67, and (e) a nucleic acid sequence that is at least 98.49% identical to SEQ ID NO: 68.

[0029] The invention provides an adenovirus or adenoviral vector comprising (1) a nucleic acid sequence encoding one or more Plasmodium antigens and (2) one or more of the nucleic acid sequences selected from the group consisting of (a) a nucleic acid sequence comprising at least 121 contiguous nucleotides of SEQ ID NO: 64, (b) a nucleic acid sequence comprising at least 462 contiguous nucleotides of SEQ ID NO: 65, (c) a nucleic acid sequence comprising at least 234 contiguous nucleotides of SEQ ID NO: 66, (d) a nucleic acid sequence comprising at least 606 contiguous nucleotides of SEQ ID NO: 67, and (e) a nucleic acid sequence comprising at least 188 contiguous nucleotides of SEQ ID NO: 68.

[0030] The invention provides an adenovirus or adenoviral vector comprising (1) a nucleic acid sequence encoding one or more Plasmodium antigens and (2) one or more of the amino acid sequences selected from the group consisting of (a) an amino acid sequence that is at least 93% identical to SEQ ID NO: 69, (b) an amino acid sequence that is at least 80% identical to SEQ ID NO: 71, (c) an amino acid sequence that is at least 92% identical to SEQ ID NO: 72, and (d) an amino acid sequence that is at least 88% identical to SEQ ID NO: 73.

[0031] The invention provides an adenovirus or adenoviral vector comprising (1) a nucleic acid sequence encoding one or more Plasmodium antigens and (2) one or more of the nucleic acid sequences selected from the group consisting of (a) a nucleic acid sequence encoding an amino acid sequence that is at least 93% identical to SEQ ID NO: 69, (b) a nucleic acid sequence encoding an amino acid sequence that is at least 95% identical to SEQ ID NO: 70, (c) a nucleic acid sequence encoding an amino acid sequence that is at least 80% identical to SEQ ID NO: 71, (d) a nucleic acid sequence encoding an amino acid sequence that is at least 92% identical to SEQ ID NO: 72, and (e) a nucleic acid sequence encoding an amino acid sequence that is at least 88% identical to SEQ ID NO: 73.

[0032] The invention provides an adenovirus or adenoviral vector comprising (1) a nucleic acid sequence encoding one or more Plasmodium antigens and (2) one or more of the amino acid sequences selected from the group consisting of (a) an amino acid sequence that is at least 99% identical to SEQ ID NO: 74, (b) an amino acid sequence that is at least 97.8% identical to SEQ ID NO: 76, (c) an amino acid sequence that is at least 99.1% identical to SEQ ID NO: 77, and (d) an amino acid sequence that is at least 99.2% identical to SEQ ID NO: 78.

[0033] The invention provides an adenovirus or adenoviral vector comprising (1) a nucleic acid sequence encoding one or more Plasmodium antigens and (2) one or more of the nucleic acid sequences selected from the group consisting of (a) a nucleic acid sequence encoding an amino acid sequence that is at least 99% identical to SEQ ID NO: 74, (b) a nucleic acid sequence encoding an amino acid sequence that is at least 99.5% identical to SEQ ID NO: 75, (c) a nucleic acid sequence encoding an amino acid sequence that is at least 97.8% identical to SEQ ID NO: 76, (d) a nucleic acid sequence encoding an amino acid sequence that is at least 99.1% identical to SEQ ID NO: 77, and (e) a nucleic acid sequence encoding an amino acid sequence that is at least 99.2% identical to SEQ ID NO: 78.

[0034] The invention provides an adenovirus or adenoviral vector comprising (1) a nucleic acid sequence encoding one or more Plasmodium antigens and (2) one or more of the amino acid sequences selected from the group consisting of (a) an amino acid sequence comprising at least 89 contiguous amino acid residues of SEQ ID NO: 74, (b) an amino acid sequence comprising at least 247 contiguous amino acid residues of SEQ ID NO: 76, (c) an amino acid sequence comprising at least 230 contiguous amino acid residues of SEQ ID NO: 77, and (d) an amino acid sequence comprising at least 231 contiguous amino acid residues of SEQ ID NO: 78.

[0035] The invention provides an adenovirus or adenoviral vector comprising (1) a nucleic acid sequence encoding one or more Plasmodium antigens and (2) one or more of the nucleic acid sequences selected from the group consisting of (a) a nucleic acid sequence encoding an amino acid sequence comprising at least 89 contiguous amino acid residues of SEQ ID NO: 74, (b) a nucleic acid sequence encoding an amino acid sequence comprising at least 286 contiguous amino acid residues of SEQ ID NO: 75, (c) a nucleic acid sequence encoding an amino acid sequence comprising at least 247 contiguous amino acid residues of SEQ ID NO: 76, (d) a nucleic acid sequence encoding an amino acid sequence comprising at least 230 contiguous amino acid residues of SEQ ID NO: 77, and (e) a nucleic acid sequence encoding an amino acid sequence comprising at least 231 contiguous amino acid residues of SEQ ID NO: 78.

[0036] The invention provides a method of inducing an immune response against Plasmodium falciparum in a mammal, especially a human, which comprises administering to the mammal an aforementioned inventive adenovirus or adenoviral vector, whereupon the nucleic acid sequence encoding the Plasmodium antigen is expressed in the mammal to produce the Plasmodium antigen and thereby induce an immune response against Plasmodium falciparum in the mammal.

### BRIEF DESCRIPTION OF THE SEVERAL VIEWS OF THE DRAWING(S)

[0037] FIG. 1 is a graph which depicts experimental data illustrating that immunization of mice with an adenoviral vector encoding P. yoelii CSP (GC44PyCSP.o) induces a CD8+ T cell response.

[0038] FIG. 2 is a graph which depicts experimental data illustrating that immunization of mice with an adenoviral vector encoding P. yoelii CSP (GC45PyCSP.o) induces a CD8+ T cell response.

[0039] FIG. 3 is a graph which depicts experimental data illustrating that immunization of mice with an adenoviral vector encoding P. yoelii CSP (GC46PyCSP.o) induces a CD8+ T cell response.

[0040] FIG. 4 is a graph which depicts experimental data illustrating that immunization of mice with an adenoviral vector encoding P. yoelii CSP (GC44PyCSP.o) induces CSP-specific antibodies.

[0041] FIG. 5 is a graph which depicts experimental data illustrating that immunization of mice with an adenoviral vector encoding P. yoelii CSP (GC45PyCSP.o) induces CSP-specific antibodies.

[0042] FIG. 6 is a graph which depicts experimental data illustrating that immunization of mice with an adenoviral vector encoding P. yoelii CSP (GC46PyCSP.o) induces CSP-specific antibodies.

### DETAILED DESCRIPTION OF THE INVENTION

[0043] Adenoviruses are generally associated with benign pathologies in humans, and the genomes of adenoviruses isolated from a variety of species, including humans, have been extensively studied. Adenovirus is a medium-sized (90-100 nm), nonenveloped icosohedral virus containing approximately 36 kb of double-stranded DNA. The adenovirus capsid mediates the key interactions of the early stages of the infection of a cell by the virus, and is required for packaging adenovirus genomes at the end of the adenovirus life cycle. The capsid comprises 252 capsomeres, which includes 240 hexons, 12 penton base proteins, and 12 fibers (Ginsberg et al., Virology, 28: 782-83 (1966)). The hexon comprises three identical proteins, namely polypeptide II (Roberts et al., Science, 232: 1148-51 (1986)). The penton base comprises five identical proteins and the fiber comprises three identical proteins. Proteins Ilia, VI, and IX are present in the adenoviral coat and are believed to stabilize the viral capsid (Stewart et al., Cell, 67: 145-54 (1991), and Stewart et al., EMBO J., 12(7): 2589-99 (1993)). The expression of the capsid proteins, with the exception of pIX, is dependent on the adenovirus polymerase protein. Therefore, major components of an adenovirus particle are expressed from the genome only when the polymerase protein gene is present and expressed.

[0044] Several features of adenoviruses make them ideal vehicles for transferring genetic material to cells for therapeutic applications (i.e. “gene therapy”), or for use as antigen delivery systems for vaccine applications. For example, adenoviruses can be produced in high titers (e.g., about 10¹³ particle units (pu)), and can transfer genetic material to nonreplicating and replicating cells. The adenoviral genome can be manipulated to carry a large amount of exogenous DNA (up to about 8 kb), and the adenoviral capsid can potentiate the transfer of even longer sequences (Curiel et al., Hum. Gene Ther., 3: 147-154 (1992)). Additionally, adenoviruses generally do not integrate into the host cell chromosome, but rather are maintained as a linear episome, thereby minimizing the likelihood that a recombinant adenovirus will interfere with normal cell function.

[0045] The invention is predicated, at least in part, on the discovery and isolation of an adenovirus that has not previously been identified or isolated. The adenovirus described herein was isolated from a gorilla. There are four widely recognized gorilla subspecies within the two species of Eastern Gorilla (Gorilla beringei) and Western Gorilla (Gorilla gorilla). The Western Gorilla species includes the subspecies Western Lowland Gorilla (Gorilla gorilla gorilla) and Cross River Gorilla (Gorilla gorilla diehli). The Eastern Gorilla species includes the subspecies Mountain Gorilla (Gorilla beringei beringei) and Eastern Lowland Gorilla (Gorilla beringei graueri) (see, e.g., Wilson and Reeder, eds., Mammalian Species of the World, 3^{rd} ed., Johns Hopkins University Press, Baltimore, Md. (2005)). The adenovirus of the invention can be isolated from Western Lowland Gorilla (Gorilla gorilla gorilla), Cross River Gorilla (Gorilla gorilla diehli), Mountain Gorilla (Gorilla beringei beringei), or Eastern Lowland Gorilla (Gorilla beringei graueri).

[0046] The genomes of several such adenoviruses have been analyzed, and it has been determined that the adenovirus can have the nucleic acid sequence of, for example, SEQ ID NO: 21, SEQ ID NO: 22, SEQ ID NO: 23, SEQ ID NO: 24, SEQ ID NO: 47, SEQ ID NO: 48, SEQ ID NO: 49, SEQ ID NO: 50, SEQ ID NO: 51, SEQ ID NO: 52, SEQ ID NO: 53, SEQ ID NO: 54, SEQ ID NO: 55, SEQ ID NO: 56, SEQ ID NO: 57, SEQ ID NO: 58, SEQ ID NO: 79, SEQ ID NO: 80, SEQ ID NO: 81, or SEQ ID NO: 82, each of which includes a number of sub-sequences that serve to uniquely define the adenovirus, namely the nucleic acid sequences of SEQ ID NOs: 1-10, 25-36, and 59-68, and the amino acid sequences of SEQ ID NOs: 11-20, 37-46, and 69-78. SEQ ID NOs: 6-10 encode the amino acid sequences of SEQ ID NOs: 16-20, respectively. SEQ ID NOs: 1-5 are a subset of the nucleic acid sequences of SEQ ID NOs: 6-10, respectively. SEQ ID NOs: 11-15 are a subset of the amino acid sequences of SEQ ID NOs: 16-20, respectively. SEQ ID NOs: 30-36 encode the amino acid sequences of SEQ ID NOs: 41-46, respectively. SEQ ID NOs: 25-29 are a subset of the nucleic acid sequences of SEQ ID NOs: 30 and 33-36, respectively. SEQ ID NOs: 37-40 are a subset of the amino acid sequences of SEQ ID NOs: 43-46, respectively. SEQ ID NOs: 64-68 encode the amino acid sequences of SEQ ID NOs: 74-78, respectively. SEQ ID NOs: 59-63 are a subset of the nucleic acid sequences of SEQ ID NOs: 64-68, respectively. SEQ ID NOs: 69-73 are a subset of the amino acid sequences of SEQ ID NOs: 74-78, respectively.

[0047] The adenovirus can be modified in the same manner as previously known adenoviruses to be used as an adenoviral vector, e.g., a gene delivery vehicle.

[0048] The term “adenovirus,” as used herein, refers to an adenovirus that retains the ability to participate in the adenovirus life cycle and has not been physically inactivated by, for example, disruption (e.g., sonication), denaturing (e.g., using heat or solvents), or cross-linkage (e.g., via formalin cross-linking). The “adenovirus life cycle” includes (1) virus binding and entry into cells, (2) transcription of the adenoviral genome and translation of adenovirus proteins, (3) replication of the adenoviral genome, and (4) viral particle assembly (see, e.g., Fields Virology, 5^{th} ed., Knipe et al. (eds.), Lippincott, Williams & Wilkins, Philadelphia (2006)).

[0049] The term “adenoviral vector,” as used herein, refers to an adenovirus in which the adenoviral genome has been manipulated to accommodate one or more nucleic acid sequences that are non-native with respect to the adenoviral genome. Typically, an adenoviral vector is generated try introducing one or more mutations (e.g., a deletion, insertion, or substitution) into the adenoviral genome of the adenovirus so as to accommodate the insertion of a non-native nucleic acid sequence, for example, for gene transfer, into the adenovirus.

[0050] The adenovirus or adenoviral vector can be replication-competent, conditionally replication-competent, or replication-deficient.

[0051] A replication-competent adenovirus or adenoviral vector can replicate in typical host cells, i.e., cells typically capable of being infected by an adenovirus. A replication-competent adenovirus or adenoviral vector can have one or more mutations as compared to the wild-type adenovirus (e.g., one or more deletions, insertions, and/or substitutions) in the adenoviral genome that do not inhibit viral replication in host cells. For example, the adenovirus or adenoviral vector can have a partial or entire deletion of the adenoviral early region known as the E3 region, which is not essential for propagation of the adenovirus or adenoviral genome.

[0052] A conditionally-replicating adenovirus or adenoviral vector is an adenovirus or adenoviral vector that has been engineered to replicate under pre-determined conditions. For example, replication-essential gene functions, e.g., gene functions encoded by the adenoviral early regions, can be operably linked to an inducible, repressible, or tissue-specific transcription control sequence, e.g., promoter. In such an embodiment, replication requires the presence or absence of specific factors that interact with the transcription control sequence. Conditionally-replicating adenoviral vectors are further described in U.S. Pat. No. 5,998,205.

[0053] A replication-deficient adenovirus or adenoviral vector is an adenovirus or adenoviral vector that requires complementation of one or more gene functions or regions of the adenoviral genome that are required for replication, as a result of, for example, a deficiency in one or more replication-essential gene function or regions, such that the adenovirus or adenoviral vector does not replicate in typical host cells, especially those in a human to be infected by the adenovirus or adenoviral vector.

[0054] A deficiency in a gene function or genomic region, as used herein, is defined as a disruption (e.g., deletion) of sufficient genetic material of the adenoviral genome to obliterate or impair the function of the gene (e.g., such that the function of the gene product is reduced by at least about 2-fold, 5-fold, 10-fold, 20-fold, 30-fold, or 50-fold) whose nucleic acid sequence was disrupted (e.g., deleted) in whole or in part. Deletion of an entire gene region often is not required for disruption of a replication-essential gene function. However, for the purpose of providing sufficient space in the adenoviral genome for one or more transgenes, removal of a majority of one or more gene regions may be desirable. While deletion of genetic material is preferred, mutation of genetic material by addition or substitution also is appropriate for disrupting gene function. Replication-essential gene functions are those gene functions that are required for adenovirus replication (e.g., propagation) and are encoded by, for example, the adenoviral early regions (e.g., the E1, E2, and E4 regions), late regions (e.g., the L1, L2, L3, L4, and L5 regions), genes involved in viral packaging (e.g., the IVa2 gene), and virus-associated RNAs (e.g., VA-RNA-1 and/or VA-RNA-2).

[0055] Whether the adenovirus or adenoviral vector is replication-competent or replication-deficient, the adenovirus or adenoviral vector retains at least a portion of the adenoviral genome. The adenovirus or adenoviral vector can comprise any portion of the adenoviral genome, including protein coding and non-protein coding regions. Desirably, the adenovirus or adenoviral vector comprises at least one nucleic acid sequence that encodes an adenovirus protein. The adenovirus or adenoviral vector can comprise a nucleic acid sequence that encodes any suitable adenovirus protein, such as, for example, a protein encoded by any one of the early region genes (i.e., E1A, E1B, E2A, E2B, E3, and/or E4 regions), or a protein encoded by any one of the late region genes, which encode the virus structural proteins (i.e., L1, L2, L3, L4, and L5 regions).

[0056] The adenovirus or adenoviral vector desirably comprises one or more nucleic acid sequences that encode the pIX protein, the DNA polymerase protein, the penton protein, the hexon protein, and/or the fiber protein. The adenovirus or adenoviral vector can comprise a full-length nucleic acid sequence that encodes a full-length amino acid sequence of an adenovirus protein. Alternatively, the adenovirus or adenoviral vector can comprise a portion of a full-length nucleic acid sequence that encodes a portion of a full-length amino acid sequence of an adenovirus protein.

[0057] A “portion” of a nucleic acid sequence comprises at least ten nucleotides (e.g., about 10 to about 5000 nucleotides). Preferably, a “portion” of a nucleic acid sequence comprises 10 or more (e.g., 15 or more, 20 or more, 25 or more, 30 or more, 35 or more, 40 or more, 45 or more, 50 or more, or 100 or more) nucleotides, but less than 5,000 (e.g., 4900 or less, 4000 or less, 3000 or less, 2000 or less, 1000 or less, 800 or less, 500 or less, 300 or less, or 100 or less) nucleotides. Preferably, a portion of a nucleic acid sequence is about 10 to about 3500 nucleotides (e.g., about 10, 20, 30, 50, 100, 300, 500, 700, 1000, 1500, 2000, 2500, or 3000 nucleotides), about 10 to about 1000 nucleotides (e.g., about 25, 55, 125, 325, 525, 725, or 925 nucleotides), or about 10 to about 500 nucleotides (e.g., about 15, 30, 40, 50, 60, 70, 80, 90, 150, 175, 250, 275, 350, 375, 450, 475, 480, 490, 495, or 499 nucleotides), or a range defined by any two of the foregoing values. More preferably, a “portion” of a nucleic acid sequence comprises no more than about 3200 nucleotides (e.g., about 10 to about 3200 nucleotides, about 10 to about 3000 nucleotides, or about 30 to about 500 nucleotides, or a range defined by any two of the foregoing values).

[0058] A “portion” of an amino acid sequence comprises at least three amino acids (e.g., about 3 to about 1,200 amino acids). Preferably, a “portion” of an amino acid sequence comprises 3 or more (e.g., 5 or more, 10 or more, 15 or more, 20 or more, 25 or more, 30 or more, 40 or more, or 50 or more) amino acids, but less than 1,200 (e.g., 1,000 or less, 800 or less, 700 or less, 600 or less, 500 or less, 400 or less, 300 or less, 200 or less, or 100 or less) amino acids. Preferably, a portion of an amino acid sequence is about 3 to about 500 amino acids (e.g., about 10, 100, 200, 300, 400, or 500 amino acids), about 3 to about 300 amino acids (e.g., about 20, 50, 75, 95, 150, 175, or 200 amino acids), or about 3 to about 100 amino acids (e.g., about 15, 25, 35, 40, 45, 60, 65, 70, 80, 85, 90, 95, or 99 amino acids), or a range defined by any two of the foregoing values. More preferably, a “portion” of an amino acid sequence comprises no more than about 500 amino acids (e.g., about 3 to about 400 amino acids, about 10 to about 250 amino acids, or about 50 to about 100 amino acids, or a range defined by any two of the foregoing values).

[0059] The adenovirus pIX protein is present in the adenovirus capsid, has been shown to strengthen hexon nonamer interactions, and is essential for the packaging of full-length genomes (see, e.g., Boulanger et al., J. Gen. Virol., 44: 783-800 (1979); Horwitz M. S., “Adenoviridae and their replication” in Virology, 2^{nd} ed., B. N. Fields et al. (eds.), Raven Press, Ltd., New York, pp. 1679-1721 (1990), Ghosh-Choudhury et al., EMBO J., 6: 1733-1739 (1987), and van Oostrum et al, J. Virol., 56: 439-448 (1985)). In addition to its contribution to adenovirus structure, pIX also has been shown to exhibit transcriptional properties, such as stimulation of adenovirus major late promoter (MLP) activity (see, e.g., Lutz et al., J. Virol., 71(7): 5102-5109 (1997)). Nucleic acid sequences that encode all or a portion of an adenovirus pIX protein include, for example, SEQ ID NO: 6, SEQ ID NO: 1, SEQ ID NO: 30, SEQ ID NO: 31, SEQ ID NO: 32, SEQ ID NO: 64, and SEQ ID NO: 59. SEQ ID NO: 25 is a subset of SEQ ID NO: 30. Amino acid sequences that comprise a full-length pIX protein, or a portion thereof, include, for example, SEQ ID NO: 16, SEQ ID NO: 11, SEQ ID NO: 41, SEQ ID NO: 42, SEQ ID NO: 74, and SEQ ID NO: 69.

[0060] The adenovirus DNA polymerase protein is essential for viral DNA replication both in vitro and in vivo. The polymerase co-purifies in a complex with the precursor (pTP) of the terminal protein (TP), which is covalently attached to the 5′ ends of adenovirus DNA (Field et al., J. Biol. Chem., 259: 9487-9495 (1984)). Both the adenovirus DNA polymerase and pTP are encoded by the E2 region. The polymerase protein is required for the expression of all the structural proteins except for pIX. Without the gene sequence for polymerase protein, polymerase protein is not produced. As a result, the viral genome is not replicated, the Major Late Promoter is not activated, and the capsid proteins are not expressed. Nucleic acid sequences that encode all or a portion of an adenovirus DNA polymerase protein include, for example, SEQ ID NO: 7, SEQ ID NO: 2, SEQ ID NO: 33, and SEQ ID NO: 65. SEQ ID NO: 26 is a subset of SEQ ID NO: 33, and SEQ ID NO: 60 is a subset of SEQ ID NO: 65. Amino acid sequences that comprise a full-length adenovirus DNA polymerase, or a portion thereof, include, for example, SEQ ID NO: 17, SEQ ID NO: 12, SEQ ID NO: 43, SEQ ID NO: 37, SEQ ID NO: 75, and SEQ ID NO: 70.

[0061] The adenovirus hexon protein is the largest and most abundant protein in the adenovirus capsid. The hexon protein is essential for virus capsid assembly, determination of the icosahedral symmetry of the capsid (which in turn defines the limits on capsid volume and DNA packaging size), and integrity of the capsid. In addition, hexon is a primary target for modification in order to reduce neutralization of adenoviral vectors (see, e.g., Gall et al., J. Virol., 72: 10260-264 (1998), and Rux et al., J. Virol., 77(17): 9553-9566 (2003)). The major structural features of the hexon protein are shared by adenoviruses across serotypes, but the hexon protein differs in size and immunological properties between serotypes (Jornvall et al., J. Biol. Chem., 256(12): 6181-6186 (1981)). A comparison of 15 adenovirus hexon proteins revealed that the predominant antigenic and serotype-specific regions of the hexon appear to be in loops 1 and 2 (i.e., LI or l1, and LII or l2, respectively), within which are seven discrete hypervariable regions (HVR1 to HVR7) varying in length and sequence between adenoviral serotypes (Crawford-Miksza et al., J. Virol., 70(3): 1836-1844 (1996)). Nucleic acid sequences that encode all or a portion of an adenovirus hexon protein include, for example, SEQ ID NO: 9 and SEQ ID NO: 4, SEQ ID NO: 35, SEQ ID NO: 28, SEQ ID NO: 67, and SEQ ID NO: 62. Amino acid sequences that comprise a full-length adenovirus hexon protein, or a portion thereof, include, for example, SEQ ID NO: 19 and SEQ ID NO: 14, SEQ ID NO: 45, SEQ ID NO: 39, SEQ ID NO: 77, and SEQ ID NO: 72.

[0062] The adenovirus fiber protein is a homotrimer of the adenoviral polypeptide IV that has three domains: the tail, shaft, and knob. (Devaux et al., J. Molec. Biol., 215: 567-88 (1990), Yeh et al., Virus Res., 33: 179-98 (1991)). The fiber protein mediates primary viral binding to receptors on the cell surface via the knob and the shaft domains (Henry et al., J. Virol., 68(8): 5239-46 (1994)). The amino acid sequences for trimerization are located in the knob, which appears necessary for the amino terminus of the fiber (the tail) to properly associate with the penton base (Novelli et al., Virology, 185: 365-76 (1991)). In addition to recognizing cell receptors and binding the penton base, the fiber contributes to serotype identity. Fiber proteins from different adenoviral serotypes differ considerably (see, e.g., Green et al., EMBO J., 2: 1357-65 (1983), Chroboczek et al., Virology, 186: 280-85 (1992), and Signas et al., J. Virol., 53: 672-78 (1985)). Thus, the fiber protein has multiple functions key to the life cycle of adenovirus. Nucleic acid sequences that encode all or a portion of an adenovirus fiber protein include, for example, SEQ ID NO: 10 and SEQ ID NO: 5, SEQ ID NO: 36, SEQ ID NO: 29, and SEQ ID NO: 68. SEQ ID NO: 63 is a subset of SEQ ID NO: 68. Amino acid sequences that comprise a full-length adenovirus fiber protein, or a portion thereof, include, for example, SEQ ID NO: 20, SEQ ID NO: 15, SEQ ID NO: 46, SEQ ID NO: 40, SEQ ID NO: 78, and SEQ ID NO: 73.

[0063] The adenovirus penton base protein is located at the vertices of the icosahedral capsid and comprises five identical monomers. The penton base protein provides a structure for bridging the hexon proteins on multiple facets of the icosahedral capsid, and provides the essential interface for the fiber protein to be incorporated in the capsid. Each monomer of the penton base contains an RGD tripeptide motif (Neumann et al., Gene, 69: 153-157 (1988)). The RGD tripeptide mediates binding to αv integrins and adenoviruses that have point mutations in the RGD sequence of the penton base are restricted in their ability to infect cells (Bai et al., J. Virol., 67: 5198-5205 (1993)). Thus, the penton base protein is essential for the architecture of the capsid and for maximum efficiency of virus-cell interaction. Nucleic acid sequences that encode all or a portion of an adenovirus penton base protein include, for example, SEQ ID NO: 8 and SEQ ID NO: 3, SEQ ID NO: 34, SEQ ID NO: 27, SEQ ID NO: 66, and SEQ ID NO: 61. Amino acid sequences that comprise a full-length adenovirus penton base protein, or a portion thereof, include, for example, SEQ ID NO: 18, SEQ ID NO: 13, SEQ ID NO: 44, SEQ ID NO: 38, SEQ ID NO: 76, and SEQ ID NO: 71.

[0064] Nucleic acid or amino acid sequence “identity,” as described herein, can be determined by comparing a nucleic acid or amino acid sequence of interest to a reference nucleic acid or amino acid sequence. The number of nucleotides or amino acid residues that have been changed and/or modified (such as, e.g., by point mutations, insertions, or deletions) in the reference sequence so as to result in the sequence of interest are counted. The total number of such changes is subtracted from the total length of the sequence of interest, and the difference is divided by the length of the sequence of interest and expressed as a percentage. A number of mathematical algorithms for obtaining the optimal alignment and calculating identity between two or more sequences are known and incorporated into a number of available software programs. Examples of such programs include CLUSTAL-W, T-Coffee, and ALIGN (for alignment of nucleic acid and amino acid sequences), BLAST programs (e.g., BLAST 2.1, BL2SEQ, and later versions thereof) and FASTA programs (e.g., FASTA3x, FASTM, and SSEARCH) (for sequence alignment and sequence similarity searches). Sequence alignment algorithms also are disclosed in, for example, Altschul et al., J. Molecular Biol., 215(3): 403-410 (1990), Beigert et al., Proc. Natl. Acad. Sci. USA, 106(10): 3770-3775 (2009), Durbin et al., eds., Biological Sequence Analysis: Probalistic Models of Proteins and Nucleic Acids, Cambridge University Press, Cambridge, UK (2009), Soding, Bioinformatics, 21(7): 951-960 (2005), Altschul et al., Nucleic Acids Res., 25(17): 3389-3402 (1997), and Gusfield, Algorithms on Strings, Trees and Sequences, Cambridge University Press, Cambridge UK (1997)).

[0065] In one embodiment, the adenovirus or adenoviral vector comprises one or more of the following nucleic acid sequences: (a) the nucleic acid sequence of SEQ ID NO: 1, (b) a nucleic acid sequence that is at least 98.5% identical (e.g., at least 98.73%, at least 98.96%, at least 99.18%, at least 99.41%, at least 99.64%, at least 99.87%, or 100% identical) to SEQ ID NO: 2, (c) a nucleic acid sequence that is at least 90% identical (e.g., at least 92.94%, at least 95.88%, 98.82%, or 100% identical) to SEQ ID NO: 3, (d) a nucleic acid sequence that is at least 80% identical (e.g., at least 80.83%, at least 83.06%, at least 85.28%, at least 87.50%, at least 89.72%, at least 91.94%, at least 94.17%, at least 96.39%, at least 98.61%, or 100% identical) to SEQ ID NO: 4, and (e) a nucleic acid sequence that is at least 89% identical (e.g., at least 92.33%, at least 95.67%, at least 99%, or 100% identical) to SEQ ID NO: 5.

[0066] The adenovirus or adenoviral vector can comprise one, two, three, four, or all five of the aforementioned sequences alone or in any combination. In this respect, the adenovirus or adenoviral vector can comprise any combination of any two of the aforementioned sequences, any combination of any three of the aforementioned sequences, any combination of any four of the aforementioned sequences, or all five of the aforementioned sequences. For example, the adenovirus or adenoviral vector can comprise the nucleic acid sequence of SEQ ID NO: 1. The adenovirus or adenoviral vector can comprise a nucleic acid sequence that is at least 98.5% identical to SEQ ID NO: 2 and a nucleic acid sequence that is at least 90% identical to SEQ ID NO: 3. The adenovirus or adenoviral vector can comprise the nucleic acid sequence of SEQ ID NO: 1, a nucleic acid sequence that is at least 90% identical to SEQ ID NO: 3, and a nucleic acid sequence that is at least 89% identical to SEQ ID NO: 5. The adenovirus or adenoviral vector can comprise (a) the nucleic acid sequence of SEQ ID NO: 1, (b) the nucleic acid sequence SEQ ID NO: 2, (c) the nucleic acid sequence of SEQ ID NO: 3, (d) the nucleic acid sequence of SEQ ID NO: 4, or (e) the nucleic acid sequence of SEQ ID NO: 5. The adenovirus or adenoviral vector can comprise (a) the nucleic acid sequence of SEQ ID NO: 1, (b) a nucleic acid sequence that is at least 98.5% identical to SEQ ID NO: 2, (c) a nucleic acid sequence that is at least 90% identical to SEQ ID NO: 3, (d) a nucleic acid sequence that is at least 80% identical to SEQ ID NO: 4, and (e) a nucleic acid sequence that is at least 89% identical to SEQ ID NO: 5. The adenovirus or adenoviral vector can comprise (a) the nucleic acid sequence of SEQ ID NO: 1, (b) the nucleic acid sequence SEQ ID NO: 2, (c) the nucleic acid sequence of SEQ ID NO: 3, (d) the nucleic acid sequence of SEQ ID NO: 4, and (e) the nucleic acid sequence of SEQ ID NO: 5.

[0067] In another embodiment, the adenovirus or adenoviral vector comprises one or more of the following nucleic acid sequences: (a) a nucleic acid sequence that is at least 98.6% identical (e.g., at least 98.85%, at least 99.10%, at least 99.35%, at least 99.60%, or 100% identical) to SEQ ID NO: 6, (b) a nucleic acid sequence that is at least 99.06% identical (e.g., at least 99.09%, at least 99.12%, at least 99.15%, at least 99.19%, at least 99.22%, at least 99.25%, at least 99.28%, at least 99.31%, at least 99.34%, at least 99.38%, at least 99.41%, at least 99.44%, at least 99.47%, at least 99.50%, at least 99.53%, at least 99.57%, at least 99.60%, at least 99.63%, at least 99.66%, at least 99.69%, at least 99.72%, at least 99.75%, at least 99.79%, at least 99.82%, at least 99.85%, at least 99.88%, at least 99.91%, at least 99.94%, at least 99.98%, or 100% identical) to SEQ ID NO: 7, (c) a nucleic acid sequence that is at least 97.13% identical (e.g., at least 97.18%, at least 97.23%, at least 97.28%, at least 97.33%, at least 97.38%, at least 97.43%, at least 97.48%, at least 97.5% at least 97.54%, at least 97.59%, at least 97.6%, at least 97.64%, at least 97.69%, at least 97.7%, at least 97.74%, at least 97.79%, at least 97.8%, at least 97.84%, at least 97.89%, at least 97.9%, at least 97.94%, at least 97.99%, at least 98%, at least 98.04%, at least 98.09%, at least 98.1%, at least 98.14%, at least 98.19%, at least 98.2%, at least 98.24%, at least 98.30%, at least 98.35%, at least 98.40%, at least 98.45%, at least 98.50%, at least 98.55%, at least 98.60%, at least 98.70%, at least 98.75%, at least 98.80%, at least 98.85%, at least 98.90%, at least 98.95%, at least 99.00%, at least 99.06%, at least 99.11%, at least 99.16%, at least 99.2%, at least 99.21%, at least 99.26%, at least 99.3%, at least 99.31%, at least 99.36%, at least 99.4%, at least 99.41%, at least 99.46%, at least 99.5%, at least 99.51%, at least 99.56%, at least 99.6%, at least 99.61%, at least 99.66%, at least 99.7%, at least 99.71%, at least 99.76%, at least 99.8%, at least 99.81%, at least 99.87%, at least 99.9%, at least 99.92%, at least 99.95%, at least 99.97%, or 100% identical) to SEQ ID NO: 8, (d) a nucleic acid sequence that is at least 90.7% identical (e.g., at least 90.73%, at least 90.77%, at least 90.80%, at least 90.84%, at least 90.87%, at least 90.91%, at least 90.94%, at least 90.98%, at least 91.01%, at least 91.05%, at least 91.08%, at least 91.12%, at least 91.15%, at least 91.19%, at least 91.22%, at least 91.26%, at least 91.29%, at least 91.33%, at least 91.36%, at least 91.40%, at least 91.43%, at least 91.46%, at least 91.50%, at least 91.53%, at least 91.57%, at least 91.60%, at least 91.64%, at least 91.67%, at least 91.71%, at least 91.74%, at least 91.78%, at least 91.81%, at least 91.85%, at least 91.88%, at least 91.92%, at least 91.95%, at least 91.99%, at least 92.02%, at least 92.06%, at least 92.09%, at least 92.13%, at least 92.16%, at least 92.19%, at least 92.23%, at least 92.26%, at least 92.30%, at least 92.33%, at least 92.37%, at least 92.40%, at least 92.44%, at least 92.47%, at least 92.51%, at least 92.54%, at least 92.58%, at least 92.61%, at least 92.65%, at least 92.68%, at least 92.72%, at least 92.75%, at least 92.79%, at least 92.82%, at least 92.86%, at least 92.89%, at least 92.92%, at least 92.96%, at least 92.99%, at least 93.03%, at least 93.06%, at least 93.10%, at least 93.13%, at least 93.17%, at least 93.20%, at least 93.24%, at least 93.27%, at least 93.31%, at least 93.34%, at least 93.38%, at least 93.41%, at least 93.45%, at least 93.48%, at least 93.52%, at least 93.55%, at least 93.58%, at least 93.62%, at least 93.65%, at least 93.69%, at least 93.72%, at least 93.76%, at least 93.79%, at least 93.83%, at least 93.86%, at least 93.90%, at least 93.93%, at least 93.97%, at least 94.00%, at least 94.04%, at least 94.07%, at least 94.11%, at least 94.14%, at least 94.18%, at least 94.21%, at least 94.25%, at least 94.28%, at least 94.31%, at least 94.35%, at least 94.38%, at least 94.42%, at least 94.45%, at least 94.49%, at least 94.52%, at least 94.56%, at least 94.59%, at least 94.63%, at least 94.66%, at least 94.70%, at least 94.73%, at least 94.77%, at least 94.80%, at least 94.84%, at least 94.87%, at least 94.91%, at least 94.94%, at least 94.98%, at least 95.01%, at least 95.04%, at least 95.08%, at least 95.11%, at least 95.15%, at least 95.18%, at least 95.22%, at least 95.25%, at least 95.29%, at least 95.32%, at least 95.36%, at least 95.39%, at least 95.43%, at least 95.46%, at least 95.50%, at least 95.53%, at least 95.57%, at least 95.60%, at least 95.64%, at least 95.67%, at least 95.71%, at least 95.74%, at least 95.77%, at least 95.81%, at least 95.84%, at least 95.88%, at least 95.91%, at least 95.95%, at least 95.98%, at least 96.02%, at least 96.05%, at least 96.09%, at least 96.12%, at least 96.16%, at least 96.19%, at least 96.23%, at least 96.26%, at least 96.30%, at least 96.33%, at least 96.37%, at least 96.40%, at least 96.44%, at least 96.47%, at least 96.50%, at least 96.54%, at least 96.57%, at least 96.61%, at least 96.64%, at least 96.68%, at least 96.71%, at least 96.75%, at least 96.78%, at least 96.82%, at least 96.85%, at least 96.89%, at least 96.92%, at least 96.96%, at least 96.99%, at least 97.03%, at least 97.06%, at least 97.10%, at least 97.13%, at least 97.17%, at least 97.20%, at least 97.23%, at least 97.27%, at least 97.30%, at least 97.34%, at least 97.37%, at least 97.41%, at least 97.44%, at least 97.48%, at least 97.51%, at least 97.55%, at least 97.58%, at least 97.62%, at least 97.65%, at least 97.69%, at least 97.72%, at least 97.76%, at least 97.79%, at least 97.83%, at least 97.86%, at least 97.89%, at least 97.93%, at least 97.96%, at least 98.00%, at least 98.03%, at least 98.07%, at least 98.10%, at least 98.14%, at least 98.17%, at least 98.21%, at least 98.24%, at least 98.28%, at least 98.31%, at least 98.35%, at least 98.38%, at least 98.42%, at least 98.45%, at least 98.49%, at least 98.52%, at least 98.56%, at least 98.59%, at least 98.62%, at least 98.66%, at least 98.69%, at least 98.73%, at least 98.76%, at least 98.80%, at least 98.83%, at least 98.87%, at least 98.90%, at least 98.94%, at least 98.97%, at least 99.01%, at least 99.04%, at least 99.08%, at least 99.11%, at least 99.15%, at least 99.18%, at least 99.22%, at least 99.25%, at least 99.29%, at least 99.32%, at least 99.35%, at least 99.39%, at least 99.42%, at least 99.46%, at least 99.49%, at least 99.53%, at least 99.56%, at least 99.60%, at least 99.63%, at least 99.67%, at least 99.70%, at least 99.74%, at least 99.77%, at least 99.81%, at least 99.84%, at least 99.88%, at least 99.91%, at least 99.95%, at least 99.98%, or 100% identical) to SEQ ID NO: 9, and (e) a nucleic acid sequence that is at least 96.6% identical (e.g., at least 96.66%, at least 96.71%, at least 96.77%, at least 96.83%, at least 96.89%, at least 96.94%, at least 97.00%, at least 97.06%, at least 97.11%, at least 97.17%, at least 97.23%, at least 97.29%, at least 97.34%, at least 97.40%, at least 97.46%, at least 97.51%, at least 97.57%, at least 97.63%, at least 97.69%, at least 97.74%, at least 97.80%, at least 97.86%, at least 97.92%, at least 97.97%, at least 98.03%, at least 98.09%, at least 98.14%, at least 98.20%/a, at least 98.26%, at least 98.32%, at least 98.37%, at least 98.43%, at least 98.49%, at least 98.54%, at least 98.60%, at least 98.66%, at least 98.72%, at least 98.77%, at least 98.83%, at least 98.89%, at least 98.94%, at least 99.000/%, at least 99.06%, at least 99.12%, at least 99.17%, at least 99.23%, at least 99.29%, at least 99.34%, at least 99.40%, at least 99.46%, at least 99.52%, at least 99.57%, at least 99.63%, at least 99.69%, at least 99.74%, at least at least 99.80%, at least 99.86%, at least 99.92%, at least 99.97%, or 100% identical) to SEQ ID NO: 10.

[0068] The adenovirus or adenoviral vector can comprise one, two, three, four, or all five of the aforementioned sequences alone or in any combination. In this respect, the adenovirus or adenoviral vector can comprise any combination of any two of the aforementioned sequences, any combination of any three of the aforementioned sequences, any combination of any four of the aforementioned sequences, or all five of the aforementioned sequences. For example, the adenovirus or adenoviral vector can comprise a nucleic acid sequence that is at least 98.6% identical to SEQ ID NO: 6. The adenovirus or adenoviral vector can comprise a nucleic acid sequence that is at least 99.06% identical to SEQ ID NO: 7 and a nucleic acid sequence that is at least 97.13% identical to SEQ ID NO: 8. The adenovirus or adenoviral vector can comprise a nucleic acid sequence that is at least 97.13% identical to SEQ ID NO: 8, a nucleic acid sequence that is at least 90.7% identical to SEQ ID NO: 9, and a nucleic acid sequence that is at least 96.6% identical to SEQ ID NO: 10. The adenovirus or adenoviral vector can comprise (a) the nucleic acid sequence of SEQ ID NO: 6, (b) the nucleic acid sequence SEQ ID NO: 7, (c) the nucleic acid sequence of SEQ ID NO: 8, (d) the nucleic acid sequence of SEQ ID NO: 9, or (e) the nucleic acid sequence of SEQ ID NO: 10. The adenovirus or adenoviral vector can comprise (a) a nucleic acid sequence that is at least 98.6% identical to SEQ ID NO: 6, (b) a nucleic acid sequence that is at least 99.06% identical to SEQ ID NO: 7, (c) a nucleic acid sequence that is at least 97.13% identical to SEQ ID NO: 8, (d) a nucleic acid sequence that is at least 90.7% identical to SEQ ID NO: 9, and (e) a nucleic acid sequence that is at least 96.6% identical to SEQ ID NO: 10. The adenovirus or adenoviral vector can comprise (a) the nucleic acid sequence of SEQ ID NO: 6, (b) the nucleic acid sequence SEQ ID NO: 7, (c) the nucleic acid sequence of SEQ ID NO: 8, (d) the nucleic acid sequence of SEQ ID NO: 9, and (e) the nucleic acid sequence of SEQ ID NO: 10.

[0069] In another embodiment, the adenovirus or adenoviral vector comprises one or more of the following nucleic acid sequences: (a) a nucleic acid sequence comprising at least 121 contiguous nucleotides of SEQ ID NO: 6, (b) a nucleic acid sequence comprising at least 462 contiguous nucleotides of SEQ ID NO: 7, (c) a nucleic acid sequence comprising at least 234 contiguous nucleotides of SEQ ID NO: 8, (d) a nucleic acid sequence comprising at least 606 contiguous nucleotides of SEQ ID NO: 9, or (e) a nucleic acid sequence comprising at least 188 contiguous nucleotides of SEQ ID NO: 10.

[0070] The adenovirus or adenoviral vector can comprise a nucleic acid sequence comprising at least 121 (e.g., 125 or more, 130 or more, 150 or more, 200 or more, 250 or more, or 300 or more) contiguous nucleotides of SEQ ID NO: 6, but no more than 399 (e.g., 398 or less, 350 or less, or 275 or less) contiguous nucleotides of SEQ ID NO: 6. Preferably, the adenovirus or adenoviral vector comprises a nucleic acid sequence comprising 121 to 300 contiguous nucleotides (e.g., 125, 150, 175, 200, 250, or 275 contiguous nucleotides), 121 to 200 contiguous nucleotides (e.g., 130, 140, 145, 160, 165, 170, 180, 185, 190, 195, or 199 contiguous nucleotides), or 121 to 150 contiguous nucleotides (e.g., 122, 123, 124, 125, 126, 127, 128, 129, 130, 131, 132, 133, 134, 135, 136, 137, 138, 139, 140, 141, 142, 143, 144, 145, 146, 147, 148, or 149 contiguous nucleotides) of SEQ ID NO: 6, or a range defined by any two of the foregoing values.

[0071] The adenovirus or adenoviral vector can comprise a nucleic acid sequence comprising at least 462 (e.g., 470 or more, 500 or more, 600 or more, 700 or more, 800 or more, 900 or more, or 1,000 or more) contiguous nucleotides of SEQ ID NO: 7, but no more than 3168 (e.g., 3,100 or less, 3,000 or less, 2,500 or less, 2,000 or less, or 1,500 or less) contiguous nucleotides of SEQ ID NO: 7. Preferably, the adenovirus or adenoviral vector comprises a nucleic acid sequence comprising 462 to 2,000 contiguous nucleotides (e.g., 475, 500, 700, 1,000, 1,200, 1,500, or 1,700 contiguous nucleotides), 462 to 1,000 contiguous nucleotides (e.g., 490, 525, 575, 600, 650, 675, 725, 750, 800, 850, 900, or 950 contiguous nucleotides), or 462 to 800 contiguous nucleotides (e.g., 480, 485, 490, 495, 499, 510, 515, 530, 540, 550, 560, 565, 570, 580, 585, 590, 595, 615, 625, 630, 640, 660, 665, 670, 680, 685, 690, 695, 705, 715, 730, 740, 755, 760, 765, 770, 775, 780, 785, 790, 795, or 799 contiguous nucleotides) of SEQ ID NO: 7, or a range defined by any two of the foregoing values.

[0072] The adenovirus or adenoviral vector can comprise a nucleic acid sequence comprising at least 234 (e.g., 235 or more, 250 or more, 300 or more, 350 or more, 400 or more, 450 or more, or 500 or more) contiguous nucleotides of SEQ ID NO: 8, but no more than 1,974 (e.g., 1,900 or less, 1,800 or less, 1,500 or less, 1,200 or less, 1,000 or less, 850 or less, 800 or less, 750 or less, or 700 or less) contiguous nucleotides of SEQ ID NO: 8. Preferably, the adenovirus or adenoviral vector comprises a nucleic acid sequence comprising 234 to 1,500 contiguous nucleotides (e.g., 290, 300, 400, 500, 600, 700, 800, 900, 1,000, or 1,200 contiguous nucleotides), 234 to 1,000 contiguous nucleotides (e.g., 295, 350, 450, 550, 650, 750, 850, or 950 contiguous nucleotides), or 234 to 500 contiguous nucleotides (e.g., 290, 305, 310, 315, 325, 340, 345, 360, 365, 370, 375, 380, 385, 390, 395, 405, 425, 430, 440, 455, 460, 465, 470, 475, 480, 485, 490, 495, or 499 contiguous nucleotides) of SEQ ID NO: 8, or a range defined by any two of the foregoing values.

[0073] The adenovirus or adenoviral vector can comprise a nucleic acid sequence comprising at least 606 (e.g., 610 or more, 650 or more, 700 or more, 800 or more, or 1,000 or more) contiguous nucleotides of SEQ ID NO: 9, but no more than 2877 (2,800 or less, 2,500 or less, 2,000 or less, 1,800 or less, or 1,500 or less) contiguous nucleotides of SEQ ID NO: 9.

[0074] Preferably, the adenovirus or adenoviral vector comprises a nucleic acid sequence comprising 606 to 2,000 contiguous nucleotides (e.g., 615, 650, 700, 800, 900, 1,000, 1,200, 1,500, 1,700, or 1,900 contiguous nucleotides), 606 to 1,000 contiguous nucleotides (e.g., 630, 645, 665, 675, 725, 750, 775, 825, 850, 875, 925, 950, or 975 contiguous nucleotides), or 606 to 800 contiguous nucleotides (e.g., 620, 635, 640, 655, 660, 670, 680, 685, 690, 695, 699, 705, 715, 730, 735, 740, 745, 755, 760, 765, 770, 785, 790, 795, or 799 contiguous nucleotides) of SEQ ID NO: 9, or a range defined by any two of the foregoing values.

[0075] The adenovirus or adenoviral vector can comprise a nucleic acid sequence comprising at least 188 (e.g., 189 or more, 200 or more, 300 or more, 500 or more, 700 or more, or 900 or more) contiguous nucleotides of SEQ ID NO: 10, but no more than 1,749 (1,700 or less, 1,500 or less, 1,200 or less, or 1,000 or less) contiguous nucleotides of SEQ ID NO: 10. Preferably, the adenovirus or adenoviral vector comprises a nucleic acid sequence comprising 188 to 1,500 contiguous nucleotides (e.g., 200, 400, 600, 800, 1,000, 1,200, or 1,400 contiguous nucleotides), 188 to 1,000 contiguous nucleotides (e.g., 195, 250, 350, 450, 550, 650, 750, 850, or 950 contiguous nucleotides), or 188 to 500 contiguous nucleotides (e.g., 190, 225, 230, 240, 255, 260, 265, 270, 275, 315, 325, 330, 340, 355, 360, 365, 370, 375, 380, 385, 390, 395, 415, 425, 430, 440, 455, 460, 465, 470, 475, 480, 485, 490, 495, or 499 contiguous nucleotides) of SEQ ID NO: 10, or a range defined by any two of the foregoing values.

[0076] The adenovirus or adenoviral vector can comprise one, two, three, four, or all five of the aforementioned sequences alone, or in any combination. In this respect, the adenovirus or adenoviral vector can comprise any combination of any two of the aforementioned sequences, any combination of any three of the aforementioned sequences, any combination of any four of the aforementioned sequences, or all five of the aforementioned sequences. For example, the adenovirus or adenoviral vector can comprise a nucleic acid sequence comprising at least 121 contiguous nucleotides of SEQ ID NO: 6. The adenovirus or adenoviral vector can comprise a nucleic acid sequence comprising at least 234 contiguous nucleotides of SEQ ID NO: 8, and a nucleic acid sequence comprising at least 188 contiguous nucleotides of SEQ ID NO: 10. The adenovirus or adenoviral vector can comprise a nucleic acid sequence comprising at least 462 contiguous nucleotides of SEQ ID NO: 7, a nucleic acid sequence comprising at least 606 contiguous nucleotides of SEQ ID NO: 9, and a nucleic acid sequence comprising at least 188 contiguous nucleotides of SEQ ID NO: 10. The adenovirus or adenoviral vector can comprise a nucleic acid sequence comprising at least 121 contiguous nucleotides of SEQ ID NO: 6, a nucleic acid sequence comprising at least 462 contiguous nucleotides of SEQ ID NO: 7, a nucleic acid sequence comprising at least 234 contiguous nucleotides of SEQ ID NO: 8, and a nucleic acid sequence comprising at least 606 contiguous nucleotides of SEQ ID NO: 9. The adenovirus or adenoviral vector can comprise (a) a nucleic acid sequence comprising at least 121 contiguous nucleotides of SEQ ID NO: 6, (b) a nucleic acid sequence comprising at least 462 contiguous nucleotides of SEQ ID NO: 7, (c) a nucleic acid sequence comprising at least 234 contiguous nucleotides of SEQ ID NO: 8, (d) a nucleic acid sequence comprising at least 606 contiguous nucleotides of SEQ ID NO: 9, and (e) a nucleic acid sequence comprising at least 188 contiguous nucleotides of SEQ ID NO: 10.

[0077] In another embodiment, the adenovirus or adenoviral vector comprises one or more of the following amino acid sequences: (a) the amino acid sequence of SEQ ID NO: 11, (b) an amino acid sequence that is at least 82% identical (e.g., at least 88.67%, at least 95.33%, or 100% identical) to SEQ ID NO: 13, (c) an amino acid sequence that is at least 80% identical (e.g., at least 81%, at least 82%, at least 83%, at least 83.06%, at least 84%, at least 85%, at least 85.28%, at least 86%, at least 87%, at least 87.5%, at least 88%, at least 88.67%, at least 89%, at least 89.72% at least 90%, at least 91%, at least 91.94%, at least 92%, at least 92.33%, at least 93%, at least 94%, at least 94.17%, at least 95%, at least 95.33%, at least 95.67%, at least 96%, at least 96.39%, at least 97%, at least 98%, at least 98.61%, at least 99%, at least 99.5%, or 100% identical) to SEQ ID NO: 14, and (d) an amino acid sequence that is at least 83% identical (e.g., at least 89.67%, at least 96.33%, or 100% identical) to SEQ ID NO: 15.

[0078] The adenovirus or adenoviral vector can comprise one, two, three, or all four of the aforementioned amino acid sequences alone or in any combination. In this respect, the adenovirus or adenoviral vector can comprise any combination of any two of the aforementioned sequences, any combination of any three of the aforementioned sequences, or all four of the aforementioned sequences. For example, the adenovirus or adenoviral vector can comprise the amino acid sequence of SEQ ID NO: 11. The adenovirus or adenoviral vector can comprise an amino acid sequence of SEQ ID NO: 11, and an amino acid sequence that is at least 82% identical to SEQ ID NO: 13. The adenovirus or adenoviral vector can comprise the amino acid sequence of SEQ ID NO: 11, an amino acid sequence that is at least 82% identical to SEQ ID NO: 13, and an amino acid sequence that is at least 83% identical to SEQ ID NO: 15. The adenovirus or adenoviral vector can comprise (a) the amino acid sequence of SEQ ID NO: 11, (b) the amino acid sequence of SEQ ID NO: 13, (c) the amino acid sequence of SEQ ID NO: 14, or (d) the amino acid sequence of SEQ ID NO: 15. The adenovirus or adenoviral vector can comprise (a) the amino acid sequence of SEQ ID NO: 11, (b) an amino acid sequence that is at least 82% identical to SEQ ID NO: 13, (c) an amino acid sequence that is at least 80% identical to SEQ ID NO: 14, and (d) an amino acid sequence that is at least 83% identical to SEQ ID NO: 15. The adenovirus or adenoviral vector can comprise (a) the amino acid sequence of SEQ ID NO: 11, (b) the amino acid sequence of SEQ ID NO: 13, (c) the amino acid sequence of SEQ ID NO: 14, and (d) the amino acid sequence of SEQ ID NO: 15.

[0079] In another embodiment, the adenovirus or adenoviral vector comprises one or more of the following amino acid sequences: (a) the amino acid sequence of SEQ ID NO: 16, (b) an amino acid sequence that is at least 97.8% identical (e.g., at least 97.95%, at least 98.10%, at least 98.26%, at least 98.41%, at least 98.56%, at least 98.710%, at least 98.86%, at least 99.02%, at least 99.17%, at least 99.32%, at least 99.47%, at least 99.62%, at least 99.78%, or 100% identical) to SEQ ID NO: 18, (c) an amino acid sequence that is at least 93.4% identical (e.g., at least 93.50%, at least 93.61%, at least 93.71%, at least 93.82%, at least 93.92%, at least 94.03%, at least 94.13%, at least 94.23%, at least 94.34%, at least 94.44%, at least 94.55%, at least 94.65%, at least 94.76%, at least 94.86%, at least 94.96%, at least 95.07%, at least 95.17%, at least 95.28%, at least 95.38%, at least 95.49%, at least 95.59%, at least 95.69%, at least 95.80%, at least 95.90%, at least 96.01%, at least 96.11%, at least 96.22%, at least 96.32%, at least 96.42%, at least 96.53%, at least 96.63%, at least 96.74%, at least 96.84%, at least 96.95%, at least 97.05%, at least 97.15%, at least 97.26%, at least 97.36%, at least 97.47%, at least 97.57%, at least 97.68%, at least 97.78%, at least 97.88%, at least 97.99%, at least 98.09%, at least 98.20%, at least 98.30%, at least 98.41%, at least 98.51%, at least 98.61%, at least 98.72%, at least 98.82%, at least 98.93%, at least 99.03%, at least 99.14%, at least 99.24%, at least 99.34%, at least 99.45%, at least 99.55%, at least 99.66%, at least 99.76%, at least 99.87%, at least 99.97%, or 100% identical) to SEQ ID NO: 19, and (d) an amino acid sequence that is at least 98.2% identical (e.g., at least 98.37%, at least 98.54%, at least 98.71%, at least 98.89%, at least 99.06%, at least 99.23%, at least 99.40%, at least 99.57%, at least 99.74%, at least 99.92%, or 100% identical) to SEQ ID NO: 20.

[0080] The adenovirus or adenoviral vector can comprise one, two, three, or all four of the aforementioned amino acid sequences alone or in any combination. In this respect, the adenovirus or adenoviral vector can comprise any combination of any two of the aforementioned sequences, any combination of any three of the aforementioned sequences, or all four of the aforementioned sequences. For example, the adenovirus or adenoviral vector can comprise the amino acid sequence of SEQ ID NO: 16. The adenovirus or adenoviral vector can comprise the amino acid sequence of SEQ ID NO: 16, and an amino acid sequence that is at least 93.4% identical to SEQ ID NO: 19. The adenovirus or adenoviral vector can comprise the amino acid sequence of SEQ ID NO: 16, an amino acid sequence that is at least 93.4% identical to SEQ ID NO: 19, and an amino acid sequence that is at least 98.2% identical to SEQ ID NO: 20. The adenovirus or adenoviral vector can comprise (a) the amino acid sequence of SEQ ID NO: 16, (b) the amino acid sequence of SEQ ID NO: 18, (c) the amino acid sequence of SEQ ID NO: 19, or (d) the amino acid sequence of SEQ ID NO: 20. The adenovirus or adenoviral vector can comprise (a) the amino acid sequence of SEQ ID NO: 16, (b) an amino acid sequence that is at least 97.8% identical to SEQ ID NO: 18, (c) an amino acid that is at least 93.4% identical to SEQ ID NO: 19, and (d) an amino acid sequence that is at least 98.2% identical to SEQ ID NO: 20.

[0081] The adenovirus or adenoviral vector can comprise (a) the amino acid sequence of SEQ ID NO: 16, (b) the amino acid sequence of SEQ ID NO: 18, (c) the amino acid sequence of SEQ ID NO: 19, and (d) the amino acid sequence of SEQ ID NO: 20.

[0082] In another embodiment, the adenovirus or adenoviral vector comprises one or more of the following amino acid sequences: (a) an amino acid sequence comprising at least 89 contiguous amino acid residues of SEQ ID NO: 16, (b) an amino acid sequence comprising at least 247 contiguous amino acid residues of SEQ ID NO: 18, (c) an amino acid sequence comprising at least 370 contiguous amino acid residues of SEQ ID NO: 19, and (d) an amino acid sequence comprising at least 192 contiguous amino acid residues of SEQ ID NO: 20.

[0083] The adenovirus or adenoviral vector can comprise an amino acid sequence comprising at least 89 (e.g., 90 or more, 100 or more, or 110 or more) contiguous amino acid residues of SEQ ID NO: 16, but no more than 133 (e.g., 130 or less, 125 or less, 120 or less, or 115 or less) contiguous amino acid residues of SEQ ID NO: 16. Preferably, the adenovirus or adenoviral vector comprises an amino acid sequence comprising 89 to 130 contiguous amino acid residues (e.g., 90, 100, 110, 115, 120, or 125 contiguous amino acid residues) of SEQ ID NO: 16, 89 to 115 contiguous amino acid residues of SEQ ID NO: 16 (e.g., 95, 110, or 112 contiguous amino acid residues), or 89 to 100 contiguous amino acid residues (e.g., 89, 90, 91, 92, 93, 94, 95, 96, 97, 98, or 99 contiguous amino acid residues) of SEQ ID NO: 16, or a range defined by any two of the foregoing values.

[0084] The adenovirus or adenoviral vector can comprise an amino acid sequence comprising at least 247 (e.g., 250 or more, 275 or more, 300 or more, or 400 or more) contiguous amino acid residues of SEQ ID NO: 18, but no more than 658 (e.g., 650 or less, 550 or less, or 450 or less) contiguous amino acid residues of SEQ ID NO: 18. Preferably, the adenovirus or adenoviral vector comprises an acid sequence comprising 247 to 600 contiguous amino acid residues (e.g., 255, 275, 300, 400, or 500 contiguous amino acid residues) of SEQ ID NO: 18, 247 to 500 contiguous amino acid residues of SEQ ID NO: 18 (e.g., 325, 350, 375, 425, 450, or 475 contiguous amino acid residues), or 247 to 400 contiguous amino acid residues (e.g., 265, 280, 285, 290, 295, 360, 365, 380, 385, 390, 395, or 399 contiguous amino acid residues) of SEQ ID NO: 18, or a range defined by any two of the foregoing values.

[0085] The adenovirus or adenoviral vector can comprise an amino acid sequence comprising at least 370 (e.g., 380 or more, 400 or more, or 500 or more) contiguous amino acid residues of SEQ ID NO: 19, but no more than 959 (e.g., 950 or less, 900 or less, 800 or less, 700 or less, or 600 or less) contiguous amino acid residues of SEQ ID NO: 19. Preferably, the adenovirus or adenoviral vector comprises an acid sequence comprising 370 to 800 contiguous amino acid residues (e.g., 390, 400, 500, 600, or 700 contiguous amino acid residues) of SEQ ID NO: 19, 370 to 600 contiguous amino acid residues (e.g., 375, 385, 395, 425, 445, 450, 465, 475, 525, 545, 550, 565 or 575 contiguous amino acid residues) of SEQ ID NO: 19, or 370 to 500 contiguous amino acid residues (e.g., 385, 389, 395, 399, 415, 435, 440, 460, 470, 480, or 499 contiguous amino acid residues) of SEQ ID NO: 19, or a range defined by any two of the foregoing values.

[0086] The adenovirus or adenoviral vector can comprise an amino acid sequence comprising at least 192 (e.g., 193 or more, 200 or more, or 300 or more) contiguous amino acid residues of SEQ ID NO: 20, but no more than 583 (e.g., 580 or less, 550 or less, 500 or less, 450 or less, or 400 or less) contiguous amino acid residues of SEQ ID NO: 20. Preferably, the adenovirus or adenoviral vector comprises an acid sequence comprising 192 to 500 contiguous amino acid residues (e.g., 198, 200, 300, or 400 contiguous amino acid residues) of SEQ ID NO: 20, 192 to 300 contiguous amino acid residues (e.g., 194, 196, 200, 210, 220, 230, 240, 250, 260, 270, 280, or 290 contiguous amino acid residues) of SEQ ID NO: 20, or 192 to 250 contiguous amino acid residues (e.g., 195, 199, 215, 225, 235, or 245 contiguous amino acid residues) of SEQ ID NO: 20, or a range defined by any two of the foregoing values.

[0087] The adenovirus or adenoviral vector can comprise one, two, three, or all four of the aforementioned amino acid sequences alone or in any combination. In this respect, the adenovirus or adenoviral vector can comprise any combination of any two of the aforementioned sequences, any combination of any three of the aforementioned sequences, or all four of the aforementioned sequences. For example, the adenovirus or adenoviral vector can comprise an amino acid sequence comprising at least 89 contiguous amino acid residues of SEQ ID NO: 16. The adenovirus or adenoviral vector can comprise an amino acid sequence comprising at least 89 contiguous amino acid residues of SEQ ID NO: 16, and an amino acid sequence comprising at least 370 contiguous amino acid residues of SEQ ID NO: 19. The adenovirus or adenoviral vector can comprise an amino acid sequence comprising at least 89 contiguous amino acid residues of SEQ ID NO: 16, an amino acid sequence comprising at least 247 contiguous amino acid residues of SEQ ID NO: 18, and an amino acid sequence comprising at least 370 contiguous amino acid residues of SEQ ID NO: 19. The adenovirus or adenoviral vector can comprise an amino acid sequence comprising at least 89 contiguous amino acid residues of SEQ ID NO: 16, an amino acid sequence comprising at least 247 contiguous amino acid residues of SEQ ID NO: 18, and an amino acid sequence comprising at least 192 contiguous amino acid residues of SEQ ID NO: 20. The adenovirus or adenoviral vector can comprise (a) an amino acid sequence comprising at least 89 contiguous amino acid residues of SEQ ID NO: 16, (b) an amino acid sequence comprising at least 247 contiguous amino acid residues of SEQ ID NO: 18, (c) an amino acid sequence comprising at least 370 contiguous amino acid residues of SEQ ID NO: 19, and (d) an amino acid sequence comprising at least 192 contiguous amino acid residues of SEQ ID NO: 20.

[0088] In other embodiments, the adenovirus or adenoviral vector comprises one or more nucleic acid sequences that encode one or more of any of the aforementioned amino acid sequences, e.g., the amino acid sequences of any of SEQ ID NOs: 11-20 or any of the variants and/or portions thereof as described herein. For example, the adenovirus or adenoviral vector can comprise a nucleic acid sequence encoding an amino acid sequence that is at least 99.78% identical (e.g., at least 99.87%, at least 99.97%, or 100% identical) to SEQ ID NO: 17, or a nucleic acid sequence encoding an amino acid sequence that is at least 99% identical (e.g., at least 99.68% or 100% identical) to SEQ ID NO: 12.

[0089] In one embodiment, the adenovirus or adenoviral vector comprises one or more of the following nucleic acid sequences: (a) a nucleic acid sequence that is at least 96% identical (e.g., at least 96% or 100% identical) to SEQ ID NO: 25, (b) a nucleic acid sequence that is at least 99% identical (e.g., at least 99.08%, at least 99.16%, at least 99.23%, at least 99.31%, at least 99.39%, at least 99.47%, at least 99.55%, at least 99.62%, at least 99.70%, at least 99.78%, at least 99.86%, at least 99.93%, or 100% identical) to SEQ ID NO: 26, (c) a nucleic acid sequence that is at least 80% identical (e.g., at least 82%, at least 84.22%, at least 86.44%, at least 88.67%, at least 90.89%, at least 93.11%, at least 95.33%, at least 97.56%, at least 99.78%, or 100% identical) to SEQ ID NO: 27, (d) a nucleic acid sequence that is at least 80% identical (e.g., at least 80.58%, at least 82.67%, at least 84.75%, at least 86.83%, at least 88.92%, at least 91.00%, at least 93.08%, at least 95.17%, at least 97.25%, at least 99.33%, or 100% identical) to SEQ ID NO: 28, and (e) a nucleic acid sequence that is at least 85.4% identical (e.g., at least 87.48%, at least 89.57%, at least 91.65%, at least 93.73%, at least 95.82%, at least 97.90%, at least 99.98%, or 100% identical) to SEQ ID NO: 29.

[0090] The adenovirus or adenoviral vector can comprise one, two, three, four, or all five of the aforementioned sequences alone or in any combination. In this respect, the adenovirus or adenoviral vector can comprise any combination of any two of the aforementioned sequences, any combination of any three of the aforementioned sequences, any combination of any four of the aforementioned sequences, or all five of the aforementioned sequences. For example, the adenovirus or adenoviral vector can comprise a nucleic acid sequence that is at least 96% identical to SEQ ID NO: 25. The adenovirus or adenoviral vector can comprise a nucleic acid sequence that is at least 99% identical to SEQ ID NO: 26 and a nucleic acid sequence that is at least 80% identical to SEQ ID NO: 27. The adenovirus or adenoviral vector can comprise a nucleic acid sequence that is at least 96% identical to SEQ ID NO: 25, a nucleic acid sequence that is at least 80% identical to SEQ ID NO: 27, and a nucleic acid sequence that is at least 85.4% identical to SEQ ID NO: 29. The adenovirus or adenoviral vector can comprise (a) the nucleic acid sequence of SEQ ID NO: 25, (b) the nucleic acid sequence SEQ ID NO: 26, (c) the nucleic acid sequence of SEQ ID NO: 27, (d) the nucleic acid sequence of SEQ ID NO: 28, or (e) the nucleic acid sequence of SEQ ID NO: 29. The adenovirus or adenoviral vector can comprise (a) a nucleic acid sequence that is at least 96% identical to SEQ ID NO: 25, (b) a nucleic acid sequence that is at least 99% identical to SEQ ID NO: 26, (c) a nucleic acid sequence that is at least 80% identical to SEQ ID NO: 27, (d) a nucleic acid sequence that is at least 80% identical to SEQ ID NO: 28, and (e) a nucleic acid sequence that is at least 85.4% identical to SEQ ID NO: 29. The adenovirus or adenoviral vector can comprise (a) the nucleic acid sequence of SEQ ID NO: 25, (b) the nucleic acid sequence SEQ ID NO: 26, (c) the nucleic acid sequence of SEQ ID NO: 27, (d) the nucleic acid sequence of SEQ ID NO: 28, and (e) the nucleic acid sequence of SEQ ID NO: 29.

[0091] In another embodiment, the adenovirus or adenoviral vector comprises one or more of the following nucleic acid sequences: (a) a nucleic acid sequence that is at least 98.7% identical (e.g., at least 98.95%, at least 99.20%, at least 99.45%, at least 99.70%, at least 99.95%, or 100% identical) to SEQ ID NO: 30, (b) a nucleic acid sequence that is at least 98.9% identical (e.g., at least 99.15%, at least 99.40%, at least 99.65%, at least 99.90%, or 100% identical) to SEQ ID NO: 31, (c) a nucleic acid sequence that is at least 99.4% identical (e.g., at least 99.65%, at least 99.90%, or 100% identical) to SEQ ID NO: 32, (d) a nucleic acid sequence that is at least 99.1% identical (e.g., at least 99.13%, at least 99.16%, at least 99.19%, at least 99.23%, at least 99.26%, at least 99.29%, at least 99.32%, at least 99.35%, at least 99.38%, at least 99.42%, at least 99.45%, at least 99.48%, at least 99.51%, at least 99.54%, at least 99.57%, at least 99.61%, at least 99.64%, at least 99.67%, at least 99.70%, at least 99.73%, at least 99.76%, at least 99.79%, at least 99.83%, at least 99.86%, at least 99.89%, at least 99.92%, at least 99.95%, at least 99.98%, or 100% identical) to SEQ ID NO: 33, (e) a nucleic acid sequence that is at least 81.25% identical (e.g., at least 81.30%, at least 81.36%, at least 81.41%, at least 81.46%, at least 81.52%, at least 81.57%, at least 81.63%, at least 81.68%, at least 81.73%, at least 81.79%, at least 81.84%, at least 81.89%, at least 81.95%, at least 82.00%, at least 82.06%, at least 82.11%, at least 82.16%, at least 82.22%, at least 82.27%, at least 82.32%, at least 82.38%, at least 82.43%, at least 82.48%, at least 82.54%, at least 82.59%, at least 82.65%, at least 82.70%, at least 82.75%, at least 82.81%, at least 82.86%, at least 82.91%, at least 82.97%, at least 83.02, at least 83.08%, at least 83.13%, at least 83.18%, at least 83.24%, at least 83.29%, at least 83.34%, at least 83.40%, at least 83.45%, at least 83.50%, at least 83.56%, at least 83.61%, at least 83.67%, at least 83.72%, at least 83.77%, at least 83.83%, at least 83.88%, at least 83.93%, at least 83.99%, at least 84.04%, at least 84.09%, at least 84.15%, at least 84.20%, at least 84.26%, at least 84.31%, at least 84.36%, at least 84.42%, at least 84.47%, at least 84.52%, at least 84.58%, at least 84.63%, at least 84.69%, at least 84.74%, at least 84.79%, at least 84.85%, at least 84.90%, at least 84.95%, at least 85.01%, at least 85.06%, at least 85.11%, at least 85.17%, at least 85.22%, at least 85.28%, at least 85.33%, at least 85.38%, at least 85.44%, at least 85.49%, at least 85.54%, at least 85.60%, at least 85.65%, at least 85.71%, at least 85.76%, at least 85.81%, at least 85.87%, at least 85.92%, at least 85.97%, at least 86.03%, at least 86.08%, at least 86.13%, at least 86.19%, at least 86.24%, at least 86.30%, at least 86.35%, at least 86.40%, at least 86.46%, at least 86.51%, at least 86.56%, at least 86.62%, at least 86.67%, at least 86.73%, at least 86.78%, at least 86.83%, at least 86.89%, at least 86.94%, at least 86.99%, at least 87.05%, at least 87.10%, at least 87.15%, at least 87.21%, at least 87.26%, at least 87.32%, at least 87.37%, at least 87.42%, at least 87.48%, at least 87.53%, at least 87.58%, at least 87.64%, at least 87.69%, at least 87.74%, at least 87.80%, at least 87.85%, at least 87.91%, at least 87.96%, at least 88.01%, at least 88.07%, at least 88.12%, at least 88.17%, at least 88.23%, at least 88.28%, at least 88.34%, at least 88.39%, at least 88.44%, at least 88.50%, at least 88.55%, at least 88.60%, at least 88.66%, at least 88.71%, at least 88.76%, at least 88.82%, at least 88.87%, at least 88.93%, at least at least 88.98%, at least 89.03%, at least 89.09%, at least 89.14%, at least 89.19%, at least 89.25%, at least 89.30%, 89.36%, at least 89.41%, at least 89.46%, at least 89.52%, at least 89.57%, at least 89.62%, at least 89.68%, at least 89.73%, at least 89.78%, at least 89.84%, at least 89.89%, at least 89.95%, at least 90.00%, at least 90.05%, at least 90.11%, at least 90.16%, at least 90.21%, at least 90.27%, at least 90.32%, at least 90.38%, at least 90.43%, at least 90.48%, at least 90.54%, at least 90.59%, at least 90.64%, at least 90.70%, at least 90.75%, at least 90.80%, at least 90.86%, at least 90.91%, at least 90.97%, at least 91.02%, at least 91.07%, at least 91.13%, at least 91.18%, at least 91.23%, at least 91.29%, at least 91.34%, at least 91.39%, at least 91.45%, at least 91.50%, at least 91.56%, at least 91.61%, at least 91.66%, at least 91.72%, at least 91.77%, at least 91.82%, at least 91.88%, at least 91.93%, at least 91.99%, at least 92.04%, at least 92.09%, at least 92.15%, at least 92.20%, at least 92.25%, at least 92.31%, at least 92.36%, at least 92.41%, at least 92.47%, at least 92.52%, at least 92.58%, at least 92.63%, at least 92.68%, at least 92.74%, at least 92.79%, at least 92.84%, at least 92.90%, at least 92.95%, at least 93.01%, at least 93.06%, at least 93.11%, at least 93.17%, at least 93.22%, at least 93.27%, at least 93.33%, at least 93.38%, at least 93.43%, at least 93.49%, at least 93.54%, at least 93.60%, at least 93.65%, at least 93.70%, at least 93.76%, at least 93.81%, at least 93.86%, at least 93.92%, at least 93.97%, at least 94.03%, at least 94.08%, at least 94.13%, at least 94.19%, at least 94.24%, at least 94.29%, at least 94.35%, at least 94.40%, at least 94.45%, at least 94.51%, at least 94.56%, at least 94.62%, at least 94.67%, at least 94.72%, at least 94.78%, at least 94.83%, at least 94.88%, at least 94.94%, at least 94.99%, at least 95.04%, at least 95.10%, at least 95.15%, at least 95.21%, at least 95.26%, at least 95.31%, at least 95.37%, at least 95.42%, at least 95.47%, at least 95.53%, at least 95.58%, at least 95.64%, at least 95.69%, at least 95.74%, at least 95.80%, at least 95.85%, at least 95.90%, at least 95.96%, at least 96.01%, at least 96.06%, at least 96.12%, at least 96.17%, at least 96.23%, at least 96.28%, at least 96.33%, at least 96.39%, at least 96.44%, at least 96.49%, at least 96.55%, at least 96.60%, at least 96.66%, at least 96.71%, at least 96.76%, at least 96.82%, at least 96.87%, at least 96.92%, at least 96.98%, at least 97.03%, at least 97.08%, at least 97.14%, at least 97.19%, at least 97.25%, at least 97.30%, at least 97.35%, at least 97.41%, at least 97.46%, at least 97.51%, at least 97.57%, at least 97.62%, at least 97.68%, at least 97.73%, at least 97.78%, at least 97.84%, at least 97.89%, at least 97.94%, at least 98.00%, at least 98.05%, at least 98.10%, at least 98.16%, at least 98.21%, at least 98.27%, at least 98.32%, at least 98.37%, at least 98.43%, at least 98.48%, at least 98.53%, at least 98.59%, at least 98.64%, at least 98.69%, at least 98.75%, at least 98.80%, at least 98.86%, at least 98.91%, at least 98.96%, at least 99.02%, at least 99.07%, at least 99.12%, at least 99.18%, at least 99.23%, at least 99.29%, at least 99.34%, at least 99.39%, at least 99.45%, at least 99.50%, at least 99.55%, at least 99.61%, at least 99.66%, at least 99.71%, at least 99.77%, at least 99.82%, at least 99.88%, at least 99.93%, at least 99.98%, or 100% identical) to SEQ ID NO: 34, (f) a nucleic acid sequence that is at least 90.83% identical (e.g., at least 90.87%, at least 90.90%, at least 90.94%, at least 90.97%, at least 91.01%, at least 91.04%, at least 91.08%, at least 91.11%, at least 91.15%, at least 91.18%, at least 91.22%, at least 91.25%, at least 91.29%, at least 91.32%, at least 91.36%, at least 91.39%, at least 91.43%, at least 91.46%, at least 91.50%, at least 91.53%, at least 91.57%, at least 91.60%, at least 91.64%, at least 91.67%, at least 91.71%, at least 91.75%, at least 91.78%, at least 91.82%, at least 91.85%, at least 91.89%, at least 91.92%, at least 91.96%, at least 91.99%, at least 92.03%, at least 92.06%, at least 92.10%, at least 92.13%, at least 92.17%, at least 92.20%, at least 92.24%, at least 92.27%, at least 92.31%, at least 92.34%, at least 92.38%, at least 92.41%, at least 92.45%, at least 92.48%, at least 92.52%, at least 92.55%, at least 92.59%, at least 92.63%, at least 92.66%, at least 92.70%, at least 92.73%, at least 92.77%, at least 92.80%, at least 92.84%, at least 92.87%, at least 92.91%, at least 92.94%, at least 92.98%, at least 93.01%, at least 93.05%, at least 93.08%, at least 93.12%, at least 93.15%, at least 93.19%, at least 93.22%, at least 93.26%, at least 93.29%, at least 93.33%, at least 93.36%, at least 93.40%, at least 93.43%, at least 93.47%, at least 93.51%, at least 93.54%, at least 93.58%, at least 93.61%, at least 93.65%, at least 93.68%, at least 93.72%, at least 93.75%, at least 93.79%, at least 93.82%, at least 93.86%, at least 93.89%, at least 93.93%, at least 93.96%, at least 94.00%, at least 94.03%, at least 94.07%, at least 94.10%, at least 94.14%, at least 94.17%, at least 94.21%, at least 94.24%, at least 94.28%, at least 94.31%, at least 94.35%, at least 94.39%, at least 94.42%, at least 94.46%, at least 94.49%, at least 94.53%, at least 94.56%, at least 94.60%, at least 94.63%, at least 94.67%, at least 94.70%, at least 94.74%, at least 94.77%, at least 94.81%, at least 94.84%, at least 94.88%, at least 94.91%, at least 94.95%, at least 94.98%, at least 95.02%, at least 95.05%, at least 95.09%, at least 95.12%, at least 95.16%, at least 95.19%, at least 95.23%, at least 95.27%, at least 95.30%, at least 95.34%, at least 95.37%, at least 95.41%, at least 95.44%, at least 95.48%, at least 95.51%, at least 95.55%, at least 95.58%, at least 95.62%, at least 95.65%, at least 95.69%, at least 95.72%, at least 95.76%, at least 95.79%, at least 95.83%, at least 95.86%, at least 95.90%, at least 95.93%, at least 95.97%, at least 96.00%, at least 96.04%, at least 96.07%, at least 96.11%, at least 96.15%, at least 96.18%, at least 96.22%, at least 96.25%, at least 96.29%, at least 96.32%, at least 96.36%, at least 96.39%, at least 96.43%, at least 96.46%, at least 96.50%, at least 96.53%, at least 96.57%, at least 96.60%, at least 96.64%, at least 96.67%, at least 96.71%, at least 96.74%, at least 96.78%, at least 96.81%, at least 96.85%, at least 96.88%, at least 96.92%, at least 96.95%, at least 96.99%, at least 97.03%, at least 97.06%, at least 97.10%, at least 97.13%, at least 97.17%, at least 97.20%, at least 97.24%, at least 97.27%, at least 97.31%, at least 97.34%, at least 97.38%, at least 97.41%, at least 97.45%, at least 97.48%, at least 97.52%, at least 97.55%, at least 97.59%, at least 97.62%, at least 97.66%, at least 97.69%, at least 97.73%, at least 97.76%, at least 97.80%, at least 97.83%, at least 97.87%, at least 97.90%, at least 97.94%, at least 97.98%, at least 98.01%, at least 98.05%, at least 98.08%, at least 98.12%, at least 98.15%, at least 98.19%, at least 98.22%, at least 98.26%, at least 98.29%, at least 98.33%, at least 98.36%, at least 98.40%, at least 98.43%, at least 98.47%, at least 98.50%, at least 98.54%, at least 98.57%, at least 98.61%, at least 98.64%, at least 98.68%, at least 98.71%, at least 98.75%, at least 98.78%, at least 98.82%, at least 98.86%, at least 98.89%, at least 98.93%, at least 98.96%, at least 99.00%, at least 99.03%, at least 99.07%, at least 99.10%, at least 99.14%, at least 99.17%, at least 99.21%, at least 99.24%, at least 99.28%, at least 99.31%, at least 99.35%, at least 99.38%, at least 99.42%, at least 99.45%, at least 99.49%, at least 99.52%, at least 99.56%, at least 99.59%, at least 99.63%, at least 99.66%, at least 99.70%, at least 99.74%, at least 99.77%, at least 99.81%, at least 99.84%, at least 99.88%, at least 99.91%, at least 99.95%, at least 99.98%, or 100% identical) to SEQ ID NO: 35, and (g) a nucleic acid sequence that is at least 82.5% identical (e.g., at least 82.56%, at least 82.61%, at least 82.67%, at least 82.73%, at least 82.79%, at least 82.84%, at least 82.90%, at least 82.96%, at least 83.02%, at least 83.07%, at least 83.13%, at least 83.19%, at least 83.25%, at least 83.30%, at least 83.36%, at least 83.42%, at least 83.48%, at least 83.53%, at least 83.59%, at least 83.65%, at least 83.71%, at least 83.76%, at least 83.82%, at least 83.88%, at least 83.94%, at least 83.99%, at least 84.05%, at least 84.11%, at least 84.17%, at least 84.22%, at least 84.28%, at least 84.34%, at least 84.40%, at least 84.45%, at least 84.51%, at least 84.57%, at least 84.63%, at least 84.68%, at least 84.74%, at least 84.80%, at least 84.86%, at least 84.91%, at least 84.97%, at least 85.03%, at least 85.09%, at least 85.14%, at least 85.20%, at least 85.26%, at least 85.32%, at least 85.37%, at least 85.43%, at least 85.49%, at least 85.55%, at least 85.60%, at least 85.66%, at least 85.72%, at least 85.78%, at least 85.83%, at least 85.89%, at least 85.95%, at least 86.01%, at least 86.06%, at least 86.12%, at least 86.18%, at least 86.24%, at least 86.29%, at least 86.35%, at least 86.41%, at least 86.47%, at least 86.52%, at least 86.58%, at least 86.64%, at least 86.70%, at least 86.75%, at least 86.81%, at least 86.87%, at least 86.93%, at least 86.98%, at least 87.04%, at least 87.10%, at least 87.16%, at least 87.21%, at least 87.27%, at least 87.33%, at least 87.39%, at least 87.44%, at least 87.50%, at least 87.56%, at least 87.61%, at least 87.67%, at least 87.73%, at least 87.79%, at least 87.84%, at least 87.90%, at least 87.96%, at least 88.02%, at least 88.07%, at least 88.13%, at least 88.19%, at least 88.25%, at least 88.30%, at least 88.36%, at least 88.42%, at least 88.48%, at least 88.53%, at least 88.59%, at least 88.65%, at least 88.71%, at least 88.76%, at least 88.82%, at least 88.88%, at least 88.94%, at least 88.99%, at least 89.05%, at least 89.11%, at least 89.17%, at least 89.22%, at least 89.28%, at least 89.34%, at least 89.40%, at least 89.45%, at least 89.51%, at least 89.57%, at least 89.63%, at least 89.68%, at least 89.74%, at least 89.80%, at least 89.86%, at least 89.91%, at least 89.97%, at least 90.03%, at least 90.09%, at least 90.14%, at least 90.20%, at least 90.26%, at least 90.32%, at least 90.37%, at least 90.43%, at least 90.49%, at least 90.55%, at least 90.60%, at least 90.66%, at least 90.72%, at least 90.78%, at least 90.83%, at least 90.89%, at least 90.95%, at least 91.01%, at least 91.06%, at least 91.12%, at least 91.18%, at least 91.24%, at least 91.29%, at least 91.35%, at least 91.41%, at least 91.47%, at least 91.52%, at least 91.58%, at least 91.64%, at least 91.70%, at least 91.75%, at least 91.81%, at least 91.87%, at least 91.93%, at least 91.98%, at least 92.04%, at least 92.10%, at least 92.16%, at least 92.21%, at least 92.27%, at least 92.33%, at least 92.39%, at least 92.44%, at least 92.50%, at least 92.56%, at least 92.61%, at least 92.67%, at least 92.73%, at least 92.79%, at least 92.84%, at least 92.90%, at least 92.96%, at least 93.02%, at least 93.07%, at least 93.13%, at least 93.19%, at least 93.25%, at least 93.30%, at least 93.36%, at least 93.42%, at least 93.48%, at least 93.53%, at least 93.59%, at least 93.65%, at least 93.71%, at least 93.76%, at least 93.82%, at least 93.88%, at least 93.94%, at least 93.99%, at least 94.05%, at least 94.11%, at least 94.17%, at least 94.22%, at least 94.28%, at least 94.34%, at least 94.40%, at least 94.45%, at least 94.51%, at least 94.57%, at least 94.63%, at least 94.68%, at least 94.74%, at least 94.80%, at least 94.86%, at least 94.91%, at least 94.97%, at least 95.03%, at least 95.09%, at least 95.14%, at least 95.20%, at least 95.26%, at least 95.32%, at least 95.37%, at least 95.43%, at least 95.49%, at least 95.55%, at least 95.60%, at least 95.66%, at least 95.72%, at least 95.78%, at least 95.83%, at least 95.89%, at least 95.95%, at least 96.01%, at least 96.06%, at least 96.12%, at least 96.18%, at least 96.24%, at least 96.29%, at least 96.35%, at least 96.41%, at least 96.47%, at least 96.52%, at least 96.58%, at least 96.64%, at least 96.70%, at least 96.75%, at least 96.81%, at least 96.87%, at least 96.93%, at least 96.98%, at least 97.04%, at least 97.10%, at least 97.16%, at least 97.21%, at least 97.27%, at least 97.33%, at least 97.39%, at least 97.44%, at least 97.50%, at least 97.56%, at least 97.61%, at least 97.67%, at least 97.73%, at least 97.79%, at least 97.84%, at least 97.90%, at least 97.96%, at least 98.02%, at least 98.07%, at least 98.13%, at least 98.19%, at least 98.25%, at least 98.30%, at least 98.36%, at least 98.42%, at least 98.48%, at least 98.53%, at least 98.59%, at least 98.65%, at least 98.71%, at least 98.76%, at least 98.82%, at least 98.88%, at least 98.94%, at least 98.99%, at least 99.05%, at least 99.11%, at least 99.17%, at least 99.22%, at least 99.28%, at least 99.34%, at least 99.40%, at least 99.45%, at least 99.51%, at least 99.57%, at least 99.63%, at least 99.68%, at least 99.74%, at least 99.80%, at least 99.86%, at least 99.91%, at least 99.97%, or 100% identical) to SEQ ID NO: 36.

[0092] The adenovirus or adenoviral vector can comprise one, two, three, four, five, six or all seven of the aforementioned sequences alone or in any combination. In this respect, the adenovirus or adenoviral vector can comprise any combination of any two of the aforementioned sequences, any combination of any three of the aforementioned sequences, any combination of any four of the aforementioned sequences, any combination of any five of the aforementioned sequences, or all six of the aforementioned sequences. For example, the adenovirus or adenoviral vector can comprise a nucleic acid sequence that is at least 98.7% identical to SEQ ID NO: 30. The adenovirus or adenoviral vector can comprise a nucleic acid sequence that is at least 81.25% identical to SEQ ID NO: 34 and a nucleic acid sequence that is at least 82.50% identical to SEQ ID NO: 36. The adenovirus or adenoviral vector can comprise a nucleic acid sequence that is at least 99.4% identical to SEQ ID NO: 32, a nucleic acid sequence that is at least 99.1% identical to SEQ ID NO: 33, a nucleic acid sequence that is at least 81.25% identical to SEQ ID NO: 34, and a nucleic acid sequence that is at least 82.5% identical to SEQ ID NO: 36. The adenovirus or adenoviral vector can comprise (a) the nucleic acid sequence of SEQ ID NO: 30, (b) the nucleic acid sequence of SEQ ID NO: 33, (c) the nucleic acid sequence of SEQ ID NO: 34, (d) the nucleic acid sequence of SEQ ID NO: 35, or (e) the nucleic acid sequence of SEQ ID NO: 36. The adenovirus or adenoviral vector can comprise (a) a nucleic acid sequence that is at least 99.4% identical to SEQ ID NO: 32, (b) a nucleic acid sequence that is at least 99.1% identical to SEQ ID NO: 33, (c) a nucleic acid sequence that is at least 81.25% identical to SEQ ID NO: 34, (d) a nucleic acid sequence that is at least 90.83% identical to SEQ ID NO: 35, and (e) a nucleic acid sequence that is at least 82.5% identical to SEQ ID NO: 36. The adenovirus or adenoviral vector can comprise (a) the nucleic acid sequence SEQ ID NO: 31, (b) the nucleic acid sequence of SEQ ID NO: 33, (c) the nucleic acid sequence of SEQ ID NO: 34, (d) the nucleic acid sequence of SEQ ID NO: 35, and (e) the nucleic acid sequence of SEQ ID NO: 36.

[0093] In another embodiment, the adenovirus or adenoviral vector comprises one or more of the following nucleic acid sequences: (a) a nucleic acid sequence comprising at least 162 contiguous nucleotides of SEQ ID NO: 30, (b) a nucleic acid sequence comprising at least 162 contiguous nucleotides of SEQ ID NO: 31, (c) a nucleic acid sequence comprising at least 121 contiguous nucleotides of SEQ ID NO: 32, (d) a nucleic acid sequence comprising at least 531 contiguous nucleotides of SEQ ID NO: 33, (e) a nucleic acid sequence comprising at least 156 contiguous nucleotides of SEQ ID NO: 34, (f) a nucleic acid sequence comprising at least 192 contiguous nucleotides of SEQ ID NO: 35, or (g) a nucleic acid sequence comprising at least 84 contiguous nucleotides of SEQ ID NO: 36.

[0094] The adenovirus or adenoviral vector can comprise a nucleic acid sequence comprising at least 162 (e.g., 165 or more, 170 or more, 190 or more, 200 or more, 250 or more, or 300 or more) contiguous nucleotides of SEQ ID NO: 30, but no more than 399 (e.g., 398 or less, 350 or less, or 275 or less) contiguous nucleotides of SEQ ID NO: 30. Preferably, the adenovirus or adenoviral vector comprises a nucleic acid sequence comprising 162 to 300 contiguous nucleotides (e.g., 163, 175, 200, 250, or 275 contiguous nucleotides), or 162 to 200 contiguous nucleotides (e.g., 164, 166, 167, 168, 169, 171, 172, 173, 174, 176, 177, 178, 179, 180, 181, 182, 183, 184, 185, 186, 187, 188, 189, 191, 192, 193, 194, 195, 196, 197, 198, or 199 contiguous nucleotides) of SEQ ID NO: 30, or a range defined by any two of the foregoing values.

[0095] The adenovirus or adenoviral vector can comprise a nucleic acid sequence comprising at least 162 (e.g., 165 or more, 170 or more, 190 or more, 200 or more, 250 or more, or 300 or more) contiguous nucleotides of SEQ ID NO: 31, but no more than 399 (e.g., 398 or less, 350 or less, or 275 or less) contiguous nucleotides of SEQ ID NO: 31. Preferably, the adenovirus or adenoviral vector comprises a nucleic acid sequence comprising 162 to 300 contiguous nucleotides (e.g., 163, 175, 200, 250, or 275 contiguous nucleotides), or 162 to 200 contiguous nucleotides (e.g., 164, 166, 167, 168, 169, 171, 172, 173, 174, 176, 177, 178, 179, 180, 181, 182, 183, 184, 185, 186, 187, 188, 189, 191, 192, 193, 194, 195, 196, 197, 198, or 199 contiguous nucleotides) of SEQ ID NO: 31, or a range defined by any two of the foregoing values.

[0096] The adenovirus or adenoviral vector can comprise a nucleic acid sequence comprising at least 121 (e.g., 125 or more, 130 or more, 150 or more, 200 or more, 250 or more, or 300 or more) contiguous nucleotides of SEQ ID NO: 32, but no more than 399 (e.g., 398 or less, 350 or less, or 275 or less) contiguous nucleotides of SEQ ID NO: 32. Preferably, the adenovirus or adenoviral vector comprises a nucleic acid sequence comprising 121 to 300 contiguous nucleotides (e.g., 125, 150, 175, 200, 250, or 275 contiguous nucleotides), 121 to 200 contiguous nucleotides (e.g., 130, 140, 145, 160, 165, 170, 180, 185, 190, 195, or 199 contiguous nucleotides), or 121 to 150 contiguous nucleotides (e.g., 122, 123, 124, 125, 126, 127, 128, 129, 130, 131, 132, 133, 134, 135, 136, 137, 138, 139, 140, 141, 142, 143, 144, 145, 146, 147, 148, or 149 contiguous nucleotides) of SEQ ID NO: 32, or a range defined by any two of the foregoing values.

[0097] The adenovirus or adenoviral vector can comprise a nucleic acid sequence comprising at least 531 (e.g., 540 or more, 600 or more, 700 or more, 800 or more, 900 or more, or 1,000 or more) contiguous nucleotides of SEQ ID NO: 33, but no more than 3168 (e.g., 3,100 or less, 3,000 or less, 2,500 or less, 2,000 or less, or 1,500 or less) contiguous nucleotides of SEQ ID NO: 33. Preferably, the adenovirus or adenoviral vector comprises a nucleic acid sequence comprising 531 to 2,000 contiguous nucleotides (e.g., 550, 600, 700, 1,000, 1,200, 1,500, or 1,700 contiguous nucleotides), 531 to 1,000 contiguous nucleotides (e.g., 535, 575, 600, 650, 675, 725, 750, 800, 850, 900, or 950 contiguous nucleotides), or 531 to 800 contiguous nucleotides (e.g., 540, 545, 550, 560, 565, 570, 580, 585, 590, 595, 615, 625, 630, 640, 660, 665, 670, 680, 685, 690, 695, 705, 715, 730, 740, 755, 760, 765, 770, 775, 780, 785, 790, 795, or 799 contiguous nucleotides) of SEQ ID NO: 33, or a range defined by any two of the foregoing values.

[0098] The adenovirus or adenoviral vector can comprise a nucleic acid sequence comprising at least 156 (e.g., 160 or more, 200 or more, 225 or more, 235 or more, 250 or more, 300 or more, 350 or more, 400 or more, 450 or more, or 500 or more) contiguous nucleotides of SEQ ID NO: 34, but no more than 1,863 (e.g., 1,800 or less, 1,500 or less, 1,200 or less, 1,000 or less, 850 or less, 800 or less, 750 or less, or 700 or less) contiguous nucleotides of SEQ ID NO: 34. Preferably, the adenovirus or adenoviral vector comprises a nucleic acid sequence comprising 156 to 1,500 contiguous nucleotides (e.g., 175, 210, 225, 245, 255, 265, 275, 290, 300, 400, 500, 600, 700, 800, 900, 1,000, or 1,200 contiguous nucleotides), 156 to 1,000 contiguous nucleotides (e.g., 165, 180, 185, 195, 205, 230, 240, 260, 270, 295, 350, 450, 550, 650, 750, 850, or 950 contiguous nucleotides), or 156 to 500 contiguous nucleotides (e.g., 199, 230, 235, 290, 305, 310, 315, 325, 340, 345, 360, 365, 370, 375, 380, 385, 390, 395, 405, 425, 430, 440, 455, 460, 465, 470, 475, 480, 485, 490, 495, or 499 contiguous nucleotides) of SEQ ID NO: 34, or a range defined by any two of the foregoing values.

[0099] The adenovirus or adenoviral vector can comprise a nucleic acid sequence comprising at least 192 (e.g., 200 or more, 300 or more, 400 or more, 500 or more, or 600 or more) contiguous nucleotides of SEQ ID NO: 35, but no more than 2841 (2,800 or less, 2,500 or less, 2,000 or less, 1,800 or less, or 1,500 or less) contiguous nucleotides of SEQ ID NO: 35. Preferably, the adenovirus or adenoviral vector comprises a nucleic acid sequence comprising 192 to 2,000 contiguous nucleotides (e.g., 200, 250, 300, 350, 400, 450, 500, 550, 600, 650, 700, 800, 900, 1,000, 1,200, 1,500, 1,700, or 1,900 contiguous nucleotides), 192 to 1,000 contiguous nucleotides (e.g., 275, 375, 475, 575, 675, 775, 875, or 975 contiguous nucleotides), or 192 to 500 contiguous nucleotides (e.g., 220, 235, 240, 255, 260, 270, 280, 285, 290, 295, 299, 305, 315, 330, 335, 340, 345, 355, 360, 365, 370, 385, 390, 395, 399, 405, 415, 430, 435, 440, 445, 455, 460, 465, 470, 485, 490, 495, 499 contiguous nucleotides) of SEQ ID NO: 35, or a range defined by any two of the foregoing values.

[0100] The adenovirus or adenoviral vector can comprise a nucleic acid sequence comprising at least 84 (e.g., 90 or more, 100 or more, 200 or more, 300 or more, 500 or more, 700 or more, or 900 or more) contiguous nucleotides of SEQ ID NO: 36, but no more than 1,740 (1,700 or less, 1,500 or less, 1,200 or less, or 1,000 or less) contiguous nucleotides of SEQ ID NO: 36. Preferably, the adenovirus or adenoviral vector comprises a nucleic acid sequence comprising 84 to 1,200 contiguous nucleotides (e.g., 95, 100, 200, 400, 600, 800, 1,000, or 1,200 contiguous nucleotides), 84 to 1,000 contiguous nucleotides (e.g., 95, 150, 195, 250, 350, 450, 550, 650, 750, 850, or 950 contiguous nucleotides), or 84 to 500 contiguous nucleotides (e.g., 90, 99, 115, 125, 130, 145, 155, 165, 175, 190, 225, 230, 240, 255, 260, 265, 270, 275, 315, 325, 330, 340, 355, 360, 365, 370, 375, 380, 385, 390, 395, 415, 425, 430, 440, 455, 460, 465, 470, 475, 480, 485, 490, 495, or 499 contiguous nucleotides) of SEQ ID NO: 36, or a range defined by any two of the foregoing values.

[0101] The adenovirus or adenoviral vector can comprise one, two, three, four, five, six, or all seven of the aforementioned sequences alone, or in any combination. In this respect, the adenovirus or adenoviral vector can comprise any combination of any two of the aforementioned sequences, any combination of any three of the aforementioned sequences, any combination of any four of the aforementioned sequences, any combination of any five of the aforementioned sequences, any combination of any six of the aforementioned sequences, or all seven of the aforementioned sequences. For example, the adenovirus or adenoviral vector can comprise a nucleic acid sequence comprising at least 162 contiguous nucleotides of SEQ ID NO: 30. The adenovirus or adenoviral vector can comprise a nucleic acid sequence comprising at least 121 contiguous nucleotides of SEQ ID NO: 32, a nucleic acid sequence comprising at least 156 contiguous nucleotides of SEQ ID NO: 34, and a nucleic acid sequence comprising at least 84 contiguous nucleotides of SEQ ID NO: 36. The adenovirus or adenoviral vector can comprise a nucleic acid sequence comprising at least 162 contiguous nucleotides of SEQ ID NO: 31, a nucleic acid sequence comprising at least 531 contiguous nucleotides of SEQ ID NO: 33, and a nucleic acid sequence comprising at least 192 contiguous nucleotides of SEQ ID NO: 35. The adenovirus or adenoviral vector can comprise a nucleic acid sequence comprising at least 121 contiguous nucleotides of SEQ ID NO: 32, and a nucleic acid sequence comprising at least 531 contiguous nucleotides of SEQ ID NO: 33. The adenovirus or adenoviral vector can comprise (a) a nucleic acid sequence comprising at least 162 contiguous nucleotides of SEQ ID NO: 30 or SEQ ID NO: 31, (b) a nucleic acid sequence comprising at least 531 contiguous nucleotides of SEQ ID NO: 33, (c) a nucleic acid sequence comprising at least 156 contiguous nucleotides of SEQ ID NO: 34, (d) a nucleic acid sequence comprising at least 192 contiguous nucleotides of SEQ ID NO: 35, and (e) a nucleic acid sequence comprising at least 84 contiguous nucleotides of SEQ ID NO: 36.

[0102] In another embodiment, the adenovirus or adenoviral vector comprises one or more of the following amino acid sequences: (a) an amino acid sequence that is at least 85% identical (e.g., at least 91.67%, at least 98.33%, or 100% identical) to SEQ ID NO: 38, (b) an amino acid sequence that is at least 80% identical (e.g., at least 86.25%, at least 92.50%, at least 98.75%, or 100% identical) to SEQ ID NO: 39, and (c) an amino acid sequence that is at least 80% identical (e.g., at least 80.25%, at least 86.50%, at least 92.75%, at least 99.00%, or 100% identical) to SEQ ID NO: 40.

[0103] The adenovirus or adenoviral vector can comprise one, two, or all three of the aforementioned amino acid sequences alone or in any combination. In this respect, the adenovirus or adenoviral vector can comprise one of the aforementioned sequences, any combination of any two of the aforementioned sequences, or all three of the aforementioned sequences. For example, the adenovirus or adenoviral vector can comprise an amino acid sequence that is at least 85% identical to SEQ ID NO: 38. The adenovirus or adenoviral vector can comprise an amino acid sequence that is at least 85% identical to SEQ ID NO: 38, and an amino acid sequence that is at least 80% identical to SEQ ID NO: 39. The adenovirus or adenoviral vector can comprise (a) an amino acid sequence that is at least 85% identical to SEQ ID NO: 38, (b) an amino acid sequence that is at least 80% identical to SEQ ID NO: 39, and (c) an amino acid sequence that is at least 80% identical to SEQ ID NO: 40. The adenovirus or adenoviral vector can comprise (a) the amino acid sequence of SEQ ID NO: 38, (b) the amino acid sequence of SEQ ID NO: 39, or (c) the amino acid sequence of SEQ ID NO: 40. The adenovirus or adenoviral vector can comprise (a) the amino acid sequence of SEQ ID NO: 38, (b) the amino acid sequence of SEQ ID NO: 39, and (c) the amino acid sequence of SEQ ID NO: 40.

[0104] In another embodiment, the adenovirus or adenoviral vector comprises one or more of the following amino acid sequences: (a) an amino acid sequence that is at least 99% identical (e.g., at least 99% or 100% identical) to SEQ ID NO: 42, (b) an amino acid sequence that is at least 81.4% identical (e.g., at least 81.56%, at least 81.72%, at least 81.88%, at least 82.04%, at least 82.21%, at least 82.37%, at least 82.53%, at least 82.69%, at least 82.85%, at least 83.01%, at least 83.17%, at least 83.33%, at least 83.49%, at least 83.65%, at least 83.82%, at least 83.98%, at least 84.14%, at least 84.30%, at least 84.46%, at least 84.62%, at least 84.78%, at least 84.94%, at least 85.10%, at least 85.26%, at least 85.43%, at least 85.59%, at least 85.75%, at least 85.91%, at least 86.07%, at least 86.23%, at least 86.39%, at least 86.55%, at least 86.71%, at least 86.88%, at least 87.04%, at least 87.20%, at least 87.36%, at least 87.52%, at least 87.68%, at least 87.84%, at least 88.00%, at least 88.16%, at least 88.32%, at least 88.49%, at least 88.65%, at least 88.81%, at least 88.97%, at least 89.13%, at least 89.29%, at least 89.45%, at least 89.61%, at least 89.77%, at least 89.93%, at least 90.10%, at least 90.26%, at least 90.42%, at least 90.58%, at least 90.74%, at least 90.90%, at least 91.06%, at least 91.22%, at least 91.38%, at least 91.54%, at least 91.71%, at least 91.87%, at least 92.03%, at least 92.19%, at least 92.35%, at least 92.51%, at least 92.67%, at least 92.83%, at least 92.99%, at least 93.16%, at least 93.32%, at least 93.48%, at least 93.64%, at least 93.80%, at least 93.96%, at least 94.12%, at least 94.28%, at least 94.44%, at least 94.60%, at least 94.77%, at least 94.93%, at least 95.09%, at least 95.25%, at least 95.41%, at least 95.57%, at least 95.73%, at least 95.89%, at least 96.05%, at least 96.21%, at least 96.38%, at least 96.54%, at least 96.70%, at least 96.86%, at least 97.02%, at least 97.18%, at least 97.34%, at least 97.50%, at least 97.66%, at least 97.83%, at least 97.99%, at least 98.15%, at least 98.31%, at least 98.47%, at least 98.63%, at least 98.79%, at least 98.95%, at least 99.11%, at least 99.27%, at least 99.44%, at least 99.60%, at least 99.76%, at least 99.92%, or 100% identical to) to SEQ ID NO: 44, (c) an amino acid sequence that is at least 91.3% identical (e.g., at least 91.41%, at least 91.51%, at least 91.62%, at least 91.72%, at least 91.83%, at least 91.93%, at least 92.04%, at least 92.14%, at least 92.25%, at least 92.36%, at least 92.46%, at least 92.57%, at least 92.67%, at least 92.78%, at least 92.88%, at least 92.99%, at least 93.10%, at least 93.20%, at least 93.31%, at least 93.41%, at least 93.52%, at least 93.62%, at least 93.73%, at least 93.83%, at least 93.94%, at least 94.05%, at least 94.15%, at least 94.26%, at least 94.36%, at least 94.47%, at least 94.57%, at least 94.68%, at least 94.78%, at least 94.89%, at least 95.00%, at least 95.10%, at least 95.21%, at least 95.31%, at least 95.42%, at least 95.52%, at least 95.63%, at least 95.74%, at least 95.84%, at least 95.95%, at least 96.05%, at least 96.16%, at least 96.26%, at least 96.37%, at least 96.47%, at least 96.58%, at least 96.69%, at least 96.79%, at least 96.90%, at least 97.00%, at least 97.11%, at least 97.21%, at least 97.32%, at least 97.42%, at least 97.53%, at least 97.64%, at least 97.74%, at least 97.85%, at least 97.95%, at least 98.06%, at least 98.16%, at least 98.27%, at least 98.37%, at least 98.48%, at least 98.59%, at least 98.69%, at least 98.80%, at least 98.90%, at least 99.01%, at least 99.11%, at least 99.22%, at least 99.33%, at least 99.43%, at least 99.54%, at least 99.64%, at least 99.75%, at least 99.85%, at least 99.96%, or 100% identical) to SEQ ID NO: 45, and (d) an amino acid sequence that is at least 83.4% identical (e.g., at least 83.57%, at least 83.74%, at least 83.92%, at least 84.09%, at least 84.26%, at least 84.43%, at least 84.61%, at least 84.78%, at least 84.95%, at least 85.12%, at least 85.30%, at least 85.47%, at least 85.64%, at least 85.81%, at least 85.99%, at least 86.16%, at least 86.33%, at least 86.50%, at least 86.68%, at least 86.85%, at least 87.02%, at least 87.19%, at least 87.37%, at least 87.54%, at least 87.71%, at least 87.88%, at least 88.06%, at least 88.23%, at least 88.40%, at least 88.57%, at least 88.74%, at least 88.92%, at least 89.09%, at least 89.26%, at least 89.43%, at least 89.61%, at least 89.78%, at least 89.95%, at least 90.12%, at least 90.30%, at least 90.47%, at least 90.64%, at least 90.81%, at least 90.99%, at least 91.16%, at least 91.33%, at least 91.50%, at least 91.68%, at least 91.85%, at least 92.02%, at least 92.19%, at least 92.37%, at least 92.54%, at least 92.71%, at least 92.88%, at least 93.06%, at least 93.23%, at least 93.40%, at least 93.57%, at least 93.74%, at least 93.92%, at least 94.09%, at least 94.26%, at least 94.43%, at least 94.61%, at least 94.78%, at least 94.95%, at least 95.12%, at least 95.30%, at least 95.47%, at least 95.64%, at least 95.81%, at least 95.99%, at least 96.16%, 96.33%, at least 96.50%, at least 96.68%, at least 96.85%, at least 97.02%, at least 97.19%, at least 97.37%, at least 97.54%, at least 97.71%, at least 97.88%, at least 98.06%, at least 98.23%, at least 98.40%, at least 98.57%, at least 98.74%, at least 98.92%, at least 99.09%, at least 99.26%, at least 99.43%, at least 99.61%, at least 99.78%, at least 99.95%, or 100% identical) to SEQ ID NO: 46.

[0105] The adenovirus or adenoviral vector can comprise one, two, three, or all four of the aforementioned amino acid sequences alone or in any combination. In this respect, the adenovirus or adenoviral vector can comprise any combination of any two of the aforementioned sequences, any combination of any three of the aforementioned sequences, or all four of the aforementioned sequences. For example, the adenovirus or adenoviral vector can comprise an amino acid sequence that is at least 99% identical to SEQ ID NO: 42. The adenovirus or adenoviral vector can comprise an amino acid sequence that is at least 99% identical to SEQ ID NO: 42, and an amino acid sequence that is at least 91.3% identical to SEQ ID NO: 45. The adenovirus or adenoviral vector can comprise an amino acid sequence that is at least 99% identical to SEQ ID NO: 42, an amino acid sequence that is at least 81.4% identical to SEQ ID NO: 44, and an amino acid sequence that is at least 91.3% identical to SEQ ID NO: 45. The adenovirus or adenoviral vector can comprise (a) the amino acid sequence of SEQ ID NO: 42, (b) the amino acid sequence of SEQ ID NO: 44, (c) the amino acid sequence of SEQ ID NO: 45, or (d) the amino acid sequence of SEQ ID NO: 46. The adenovirus or adenoviral vector can comprise (a) an amino acid sequence that is at least 99% identical to SEQ ID NO: 42, (b) an amino acid sequence that is at least 81.4% identical to SEQ ID NO: 44, (c) an amino acid sequence that is at least 91.3% identical to SEQ ID NO: 45, and (d) an amino acid sequence that is at least 83.4% identical to SEQ ID NO: 46. The adenovirus or adenoviral vector can comprise (a) the amino acid sequence of SEQ ID NO: 42, (b) the amino acid sequence of SEQ ID NO: 44, (c) the amino acid sequence of SEQ ID NO: 45, and (d) the amino acid sequence of SEQ ID NO: 46.

[0106] In another embodiment, the adenovirus or adenoviral vector comprises one or more of the following amino acid sequences: (a) an amino acid sequence comprising at least 89 contiguous amino acid residues of SEQ ID NO: 42, (b) an amino acid sequence comprising at least 114 contiguous amino acid residues of SEQ ID NO: 44, (c) an amino acid sequence comprising at least 231 contiguous amino acid residues of SEQ ID NO: 45, and (d) an amino acid sequence comprising at least 30 contiguous amino acid residues of SEQ ID NO: 46.

[0107] The adenovirus or adenoviral vector can comprise an amino acid sequence comprising at least 89 (e.g., 90 or more, 100 or more, or 110 or more) contiguous amino acid residues of SEQ ID NO: 42, but no more than 133 (e.g., 130 or less, 125 or less, 120 or less, or 115 or less) contiguous amino acid residues of SEQ ID NO: 42. Preferably, the adenovirus or adenoviral vector comprises an amino acid sequence comprising 89 to 130 contiguous amino acid residues (e.g., 90, 100, 110, 115, 120, or 125 contiguous amino acid residues) of SEQ ID NO: 42, 89 to 115 contiguous amino acid residues of SEQ ID NO: 42 (e.g., 95, 110, or 112 contiguous amino acid residues), or 89 to 100 contiguous amino acid residues (e.g., 89, 90, 91, 92, 93, 94, 95, 96, 97, 98, or 99 contiguous amino acid residues) of SEQ ID NO: 42, or a range defined by any two of the foregoing values.

[0108] The adenovirus or adenoviral vector can comprise an amino acid sequence comprising at least 114 (e.g., 125 or more, 150 or more, 175 or more, 200 or more, 250 or more 250 or more, 275 or more, 300 or more, or 400 or more) contiguous amino acid residues of SEQ ID NO: 44, but no more than 621 (e.g., 620 or less, 600 or less, 550 or less, or 450 or less) contiguous amino acid residues of SEQ ID NO: 44. Preferably, the adenovirus or adenoviral vector comprises an acid sequence comprising 114 to 600 contiguous amino acid residues (e.g., 155, 180, 200, 250, 275, 300, 400, or 500 contiguous amino acid residues) of SEQ ID NO: 44, 114 to 500 contiguous amino acid residues of SEQ ID NO: 44 (e.g., 130, 160, 190, 220, 250, 280, 310, 340, 370, 375, 400, 425, 450, or 475 contiguous amino acid residues), or 114 to 300 contiguous amino acid residues (e.g., 165, 175, 185, 195, 199, 15, 225, 235, 245, 255, 265, 285, 295, 299, 315, 325, 335, 345, 355, 360, 365, 380, 385, 390, 395, or 399 contiguous amino acid residues) of SEQ ID NO: 44, or a range defined by any two of the foregoing values.

[0109] The adenovirus or adenoviral vector can comprise an amino acid sequence comprising at least 231 (e.g., 250 or more, 300 or more, 400 or more, or 500 or more) contiguous amino acid residues of SEQ ID NO: 45, but no more than 947 (e.g., 940 or less, 900 or less, 800 or less, 700 or less, or 600 or less) contiguous amino acid residues of SEQ ID NO: 45. Preferably, the adenovirus or adenoviral vector comprises an acid sequence comprising 231 to 800 contiguous amino acid residues (e.g., 250, 275, 290, 325, 350, 375, 390, 400, 500, 600, or 700 contiguous amino acid residues) of SEQ ID NO: 45, 231 to 600 contiguous amino acid residues (e.g., 235, 260, 285, 300, 335, 360, 375, 385, 395, 425, 445, 450, 465, 475, 525, 545, 550, 565 or 575 contiguous amino acid residues) of SEQ ID NO: 45, or 231 to 400 contiguous amino acid residues (e.g., 245, 255, 265, 285, 295, 299, 315, 345, 355, 365, 385, 389, 395, or 399 contiguous amino acid residues) of SEQ ID NO: 45, or a range defined by any two of the foregoing values.

[0110] The adenovirus or adenoviral vector can comprise an amino acid sequence comprising at least 30 (e.g., 50 or more, 75 or more, 100 or more, 200 or more, or 300 or more) contiguous amino acid residues of SEQ ID NO: 46, but no more than 580 (e.g., 575 or less, 550 or less, 500 or less, 450 or less, or 400 or less) contiguous amino acid residues of SEQ ID NO: 46. Preferably, the adenovirus or adenoviral vector comprises an acid sequence comprising 30 to 500 contiguous amino acid residues (e.g., 35, 55, 85, 105, 135, 155, 175, 195, 200, 205, 235, 250, 275, 295, 300, 305, 335, 350, 375, 395, 400, 405, 435, 450, 475, 495, or 499 contiguous amino acid residues) of SEQ ID NO: 46, 30 to 300 contiguous amino acid residues (e.g., 40, 60, 70, 90, 125, 140, 160, 170, 180, 190, 200, 210, 220, 230, 240, 250, 260, 270, 280, or 290 contiguous amino acid residues) of SEQ ID NO: 46, or 30 to 100 contiguous amino acid residues (e.g., 33, 34, 39, 42, 43, 44, 49, 52, 58, 59, 62, 68, 69, 72, 78, 79, 81, 84, 87, 88, 91, 92, 93, 94, 97, 98, or 99 contiguous amino acid residues) of SEQ ID NO: 46, or a range defined by any two of the foregoing values.

[0111] The adenovirus or adenoviral vector can comprise one, two, three, or all four of the aforementioned amino acid sequences alone or in any combination. In this respect, the adenovirus or adenoviral vector can comprise any combination of any two of the aforementioned sequences, any combination of any three of the aforementioned sequences, or all four of the aforementioned sequences. For example, the adenovirus or adenoviral vector can comprise an amino acid sequence comprising at least 89 contiguous amino acid residues of SEQ ID NO: 42. The adenovirus or adenoviral vector can comprise an amino acid sequence comprising at least 89 contiguous amino acid residues of SEQ ID NO: 42, and an amino acid sequence comprising at least 114 contiguous amino acid residues of SEQ ID NO: 44. The adenovirus or adenoviral vector can comprise (a) an amino acid sequence comprising at least 89 contiguous amino acid residues of SEQ ID NO: 42, (b) an amino acid sequence comprising at least 231 contiguous amino acid residues of SEQ ID NO: 45, and (c) an amino acid sequence comprising at least 30 contiguous amino acid residues of SEQ ID NO: 46. The adenovirus or adenoviral vector can comprise (a) an amino acid sequence comprising at least 114 contiguous amino acid residues of SEQ ID NO: 44, (b) an amino acid sequence comprising at least 231 contiguous amino acid residues of SEQ ID NO: 45, and (c) an amino acid sequence comprising at least 30 contiguous amino acid residues of SEQ ID NO: 46. The adenovirus or adenoviral vector can comprise (a) an amino acid sequence comprising at least 89 contiguous amino acid residues of SEQ ID NO: 42, (b) an amino acid sequence comprising at least 114 contiguous amino acid residues of SEQ ID NO: 44, (c) an amino acid sequence comprising at least 231 contiguous amino acid residues of SEQ ID NO: 45, and (d) an amino acid sequence comprising at least 30 contiguous amino acid residues of SEQ ID NO: 46.

[0112] In other embodiments, the adenovirus or adenoviral vector comprises one or more nucleic acid sequences that encode one or more of any of the aforementioned amino acid sequences, e.g., the amino acid sequences of any of SEQ ID NOs: 37-46 or any of the variants and/or portions thereof as described herein. For example, the adenovirus or adenoviral vector can comprise a nucleic acid sequence encoding an amino acid sequence that is at least 99.75% identical (e.g., at least 99.84%, at least 99.94%, or 100% identical) to SEQ ID NO: 43, or a nucleic acid sequence encoding an amino acid sequence that is at least 99.7% identical (e.g., at least 99.93% or 100% identical) to SEQ ID NO: 37.

[0113] In one embodiment, the adenovirus or adenoviral vector comprises one or more of the following nucleic acid sequences: (a) a nucleic acid sequence that is at least 97% identical (e.g., at least 98.20%, at least 99.41%, or 100% identical) to SEQ ID NO: 59, (b) a nucleic acid sequence that is at least 97.5% identical (e.g., at least 98.5%, at least 99.5%, or 100% identical) to SEQ ID NO: 60, (c) a nucleic acid sequence that is at least 80% identical (e.g., at least 82.22%, at least 84.44%, at least 86.67%, at least 88.89%, at least 91.11%, at least 93.33%, at least 95.56%, at least 97.78%, or 100% identical) to SEQ ID NO: 61, (d) a nucleic acid sequence that is at least 96% identical (e.g., at least 96.9%, at least 97.8%, at least 98.7%, at least 99.6%, or 100% identical) to SEQ ID NO: 62, and (e) a nucleic acid sequence that is at least 96% identical (e.g., at least 96.83% or 100% identical) to SEQ ID NO: 63.

[0114] The adenovirus or adenoviral vector can comprise one, two, three, four, or all five of the aforementioned sequences alone or in any combination. In this respect, the adenovirus or adenoviral vector can comprise any combination of any two of the aforementioned sequences, any combination of any three of the aforementioned sequences, any combination of any four of the aforementioned sequences, or all five of the aforementioned sequences. For example, the adenovirus or adenoviral vector can comprise a nucleic acid sequence that is at least 97% identical to SEQ ID NO: 59. The adenovirus or adenoviral vector can comprise a nucleic acid sequence that is at least 97.5% identical to SEQ ID NO: 60 and a nucleic acid sequence that is at least 80% identical to SEQ ID NO: 61. The adenovirus or adenoviral vector can comprise a nucleic acid sequence that is at least 97% identical to SEQ ID NO: 59, a nucleic acid sequence that is at least 80% identical to SEQ ID NO: 61, and a nucleic acid sequence that is at least 96% identical to SEQ ID NO: 63. The adenovirus or adenoviral vector can comprise (a) the nucleic acid sequence of SEQ ID NO: 59, (b) the nucleic acid sequence SEQ ID NO: 60, (c) the nucleic acid sequence of SEQ ID NO: 61, (d) the nucleic acid sequence of SEQ ID NO: 62, or (e) the nucleic acid sequence of SEQ ID NO: 63. The adenovirus or adenoviral vector can comprise (a) a nucleic acid sequence that is at least 97% identical to SEQ ID NO: 59, (b) a nucleic acid sequence that is at least 97.5% identical to SEQ ID NO: 60, (c) a nucleic acid sequence that is at least 80% identical to SEQ ID NO: 61, (d) a nucleic acid sequence that is at least 96% identical to SEQ ID NO: 62, and (e) a nucleic acid sequence that is at least 96% identical to SEQ ID NO: 63. The adenovirus or adenoviral vector can comprise (a) the nucleic acid sequence of SEQ ID NO: 59, (b) the nucleic acid sequence SEQ ID NO: 60, (c) the nucleic acid sequence of SEQ ID NO: 61, (d) the nucleic acid sequence of SEQ ID NO: 62, and (e) the nucleic acid sequence of SEQ ID NO: 63.

[0115] In another embodiment, the adenovirus or adenoviral vector comprises one or more of the following nucleic acid sequences: (a) a nucleic acid sequence that is at least 98.4% identical (e.g., at least 98.65%, at least 98.9%, at least 99.15%, at least 99.4%, at least 99.65%, at least 99.9%, or 100% identical) to SEQ ID NO: 64, (b) a nucleic acid sequence that is at least 99.01% identical (e.g., at least 99.04%, at least 99.07%, at least 99.10%, at least 99.14%, at least 99.17%, at least 99.20%, at least 99.23%, at least 99.26%, at least 99.29%, at least 99.33%, at least 99.36%, at least 99.39%, at least 99.42%, at least 99.45%, at least 99.48%, at least 99.52%, at least 99.55%, at least 99.58%, at least 99.61%, at least 99.64%, at least 99.67%, at least 99.70%, at least 99.74%, at least 99.77%, at least 99.80%, at least 99.83%, at least 99.86%, at least 99.89%, at least 99.93%, at least 99.96%, at least 99.99%, or 100% identical) to SEQ ID NO: 65, (c) a nucleic acid sequence that is at least 97.08% identical (e.g., at least 97.13%, at least 97.18%, at least 97.23%, at least 97.28%, at least 97.33%, at least 97.38%, at least 97.43%, at least 97.49%, at least 97.54%, at least 97.59%, at least 97.64%, at least 97.69%, at least 97.74%, at least 97.79%, at least 97.84%, at least 97.89%, at least 97.94%, at least 97.99%, at least 98.04%, at least 98.09%, at least 98.14%, at least 98.19%, at least 98.25%, at least 98.30%, at least 98.35%, at least 98.40%, at least 98.45%, at least 98.50%, at least 98.55%, at least 98.60%, at least 98.65%, at least 98.70%, at least 98.75%, at least 98.80%, at least 98.85%, at least 98.90%, at least 98.95%, at least 99.01%, at least 99.06%, at least 99.11%, at least 99.16%, at least 99.21%, at least 99.26%, at least 99.31%, at least 99.36%, at least 99.41%, at least 99.46%, at least 99.5%1, at least 99.56%, at least 99.61%, at least 99.66%, at least 99.71%, at least 99.76%, at least 99.82%, at least 99.87%, at least 99.92%, at least 99.97%, or 100% identical) to SEQ ID NO: 66, (d) a nucleic acid sequence that is at least 96.52% identical (e.g., at least 96.55%, at least 96.59%, at least 96.62%, at least 96.66%, at least 96.69%, at least 96.73%, at least 96.76%, at least 96.80%, at least 96.83%, at least 96.87%, at least 96.90%, at least 96.94%, at least 96.97%, at least 97.01%, at least 97.04%, at least 97.08%, at least 97.11%, at least 97.15%, at least 97.18%, at least 97.22%, at least 97.25%, at least 97.29%, at least 97.32%, at least 97.36%, at least 97.39%, at least 97.43%, at least 97.46%, at least 97.50%, at least 97.53%, at least 97.57%, at least 97.60%, at least 97.64%, at least 97.67%, at least 97.71%, at least 97.74%, at least 97.78%, at least 97.81%, at least 97.85%, at least 97.88%, at least 97.92%, at least 97.95%, at least 97.99%, at least 98.02%, at least 98.06%, at least 98.09%, at least 98.13%, at least 98.16%, at least at least 98.20%, at least 98.23%, at least 98.27%, at least 98.30%, at least 98.34%, at least 98.37%, at least at least 98.40%, at least 98.44%, at least 98.47%, at least 98.51%, at least 98.54%, at least 98.58%, at least 98.61%, at least 98.65%, at least 98.68%, at least 98.72%, at least 98.75%, at least 98.79%, at least 98.82%, at least 98.86%, at least 98.89%, at least 98.93%, at least 98.96%, at least 99.00%, at least 99.03%, at least 99.07%, at least 99.10%, at least 99.14%, at least 99.17%, at least 99.21%, at least 99.24%, at least 99.28%, at least 99.31%, at least 99.35%, at least 99.38%, at least 99.42%, at least 99.45%, at least 99.49%, at least 99.52%, at least 99.56%, at least 99.59%, at least 99.63%, at least 99.66%, at least 99.70%, at least 99.73%, at least 99.77%, at least 99.80%, at least 99.84%, at least 99.87%, at least 99.91%, at least 99.94%, at least 99.98%, or 100% identical) to SEQ ID NO: 67, and (e) a nucleic acid sequence that is at least 98.49% identical (e.g., at least 98.55%, at least 98.60%, at least 98.66%, at least 98.72%, at least 98.78%, at least 98.83%, at least 98.89%, at least 98.95%, at least 99.01%, at least 99.06%, at least 99.12%, at least 99.18%, at least 99.24%, at least 99.29%, at least 99.35%, at least 99.41%, at least 99.47%, at least 99.52%, at least 99.58%, at least 99.64%, at least 99.70%, at least 99.75%, at least 99.81%, at least 99.87%, at least 99.93%, at least 99.98%, or 100% identical) to SEQ ID NO: 68.

[0116] The adenovirus or adenoviral vector can comprise one, two, three, four, or all five of the aforementioned sequences alone or in any combination. In this respect, the adenovirus or adenoviral vector can comprise any combination of any two of the aforementioned sequences, any combination of any three of the aforementioned sequences, any combination of any four of the aforementioned sequences, or all five of the aforementioned sequences. For example, the adenovirus or adenoviral vector can comprise a nucleic acid sequence that is at least 98.4% identical to SEQ ID NO: 64. The adenovirus or adenoviral vector can comprise a nucleic acid sequence that is at least 99.01% identical to SEQ ID NO: 65 and a nucleic acid sequence that is at least 97.08% identical to SEQ ID NO: 66. The adenovirus or adenoviral vector can comprise a nucleic acid sequence that is at least 97.08% identical to SEQ ID NO: 66, a nucleic acid sequence that is at least 96.52% identical to SEQ ID NO: 67, and a nucleic acid sequence that is at least 98.49% identical to SEQ ID NO: 68. The adenovirus or adenoviral vector can comprise (a) the nucleic acid sequence of SEQ ID NO: 64, (b) the nucleic acid sequence SEQ ID NO: 65, (c) the nucleic acid sequence of SEQ ID NO: 66, (d) the nucleic acid sequence of SEQ ID NO: 67, or (e) the nucleic acid sequence of SEQ ID NO: 68. The adenovirus or adenoviral vector can comprise (a) a nucleic acid sequence that is at least 98.4% identical to SEQ ID NO: 64, (b) a nucleic acid sequence that is at least 99.01% identical to SEQ ID NO: 65, (c) a nucleic acid sequence that is at least 97.08% identical to SEQ ID NO: 66, (d) a nucleic acid sequence that is at least 96.52% identical to SEQ ID NO: 67, and (e) a nucleic acid sequence that is at least 98.49% identical to SEQ ID NO: 68. The adenovirus or adenoviral vector can comprise (a) the nucleic acid sequence of SEQ ID NO: 64, (b) the nucleic acid sequence SEQ ID NO: 65, (c) the nucleic acid sequence of SEQ ID NO: 66, (d) the nucleic acid sequence of SEQ ID NO: 67, and (e) the nucleic acid sequence of SEQ ID NO: 68.

[0117] In another embodiment, the adenovirus or adenoviral vector comprises one or more of the following nucleic acid sequences: (a) a nucleic acid sequence comprising at least 121 contiguous nucleotides of SEQ ID NO: 64, (b) a nucleic acid sequence comprising at least 462 contiguous nucleotides of SEQ ID NO: 65, (c) a nucleic acid sequence comprising at least 234 contiguous nucleotides of SEQ ID NO: 66, (d) a nucleic acid sequence comprising at least 606 contiguous nucleotides of SEQ ID NO: 67, or (e) a nucleic acid sequence comprising at least 188 contiguous nucleotides of SEQ ID NO: 68.

[0118] The adenovirus or adenoviral vector can comprise a nucleic acid sequence comprising at least 121 (e.g., 125 or more, 130 or more, 150 or more, 200 or more, 250 or more, or 300 or more) contiguous nucleotides of SEQ ID NO: 64, but no more than 399 (e.g., 398 or less, 350 or less, or 275 or less) contiguous nucleotides of SEQ ID NO: 64. Preferably, the adenovirus or adenoviral vector comprises a nucleic acid sequence comprising 121 to 300 contiguous nucleotides (e.g., 125, 150, 175, 200, 250, or 275 contiguous nucleotides), 121 to 200 contiguous nucleotides (e.g., 130, 140, 145, 160, 165, 170, 180, 185, 190, 195, or 199 contiguous nucleotides), or 121 to 150 contiguous nucleotides (e.g., 122, 123, 124, 125, 126, 127, 128, 129, 130, 131, 132, 133, 134, 135, 136, 137, 138, 139, 140, 141, 142, 143, 144, 145, 146, 147, 148, or 149 contiguous nucleotides) of SEQ ID NO: 64, or a range defined by any two of the foregoing values.

[0119] The adenovirus or adenoviral vector can comprise a nucleic acid sequence comprising at least 462 (e.g., 470 or more, 500 or more, 600 or more, 700 or more, 800 or more, 900 or more, or 1,000 or more) contiguous nucleotides of SEQ ID NO: 65, but no more than 3168 (e.g., 3,100 or less, 3,000 or less, 2,500 or less, 2,000 or less, or 1,500 or less) contiguous nucleotides of SEQ ID NO: 65. Preferably, the adenovirus or adenoviral vector comprises a nucleic acid sequence comprising 462 to 2,000 contiguous nucleotides (e.g., 475, 500, 700, 1,000, 1,200, 1,500, or 1,700 contiguous nucleotides), 462 to 1,000 contiguous nucleotides (e.g., 490, 525, 575, 600, 650, 675, 725, 750, 800, 850, 900, or 950 contiguous nucleotides), or 462 to 800 contiguous nucleotides (e.g., 480, 485, 490, 495, 499, 510, 515, 530, 540, 550, 560, 565, 570, 580, 585, 590, 595, 615, 625, 630, 640, 660, 665, 670, 680, 685, 690, 695, 705, 715, 730, 740, 755, 760, 765, 770, 775, 780, 785, 790, 795, or 799 contiguous nucleotides) of SEQ ID NO: 65, or a range defined by any two of the foregoing values.

[0120] The adenovirus or adenoviral vector can comprise a nucleic acid sequence comprising at least 234 (e.g., 235 or more, 250 or more, 300 or more, 350 or more, 400 or more, 450 or more, or 500 or more) contiguous nucleotides of SEQ ID NO: 66, but no more than 1,974 (e.g., 1,900 or less, 1,800 or less, 1,500 or less, 1,200 or less, 1,000 or less, 850 or less, 800 or less, 750 or less, or 700 or less) contiguous nucleotides of SEQ ID NO: 66. Preferably, the adenovirus or adenoviral vector comprises a nucleic acid sequence comprising 234 to 1,500 contiguous nucleotides (e.g., 290, 300, 400, 500, 600, 700, 800, 900, 1,000, or 1,200 contiguous nucleotides), 234 to 1,000 contiguous nucleotides (e.g., 295, 350, 450, 550, 650, 750, 850, or 950 contiguous nucleotides), or 234 to 500 contiguous nucleotides (e.g., 290, 305, 310, 315, 325, 340, 345, 360, 365, 370, 375, 380, 385, 390, 395, 405, 425, 430, 440, 455, 460, 465, 470, 475, 480, 485, 490, 495, or 499 contiguous nucleotides) of SEQ ID NO: 66, or a range defined by any two of the foregoing values.

[0121] The adenovirus or adenoviral vector can comprise a nucleic acid sequence comprising at least 606 (e.g., 610 or more, 650 or more, 700 or more, 800 or more, or 1,000 or more) contiguous nucleotides of SEQ ID NO: 67, but no more than 2865 (2,800 or less, 2,500 or less, 2,000 or less, 1,800 or less, or 1,500 or less) contiguous nucleotides of SEQ ID NO: 67. Preferably, the adenovirus or adenoviral vector comprises a nucleic acid sequence comprising 606 to 2,000 contiguous nucleotides (e.g., 615, 650, 700, 800, 900, 1,000, 1,200, 1,500, 1,700, or 1,900 contiguous nucleotides), 606 to 1,000 contiguous nucleotides (e.g., 630, 645, 665, 675, 725, 750, 775, 825, 850, 875, 925, 950, or 975 contiguous nucleotides), or 606 to 800 contiguous nucleotides (e.g., 620, 635, 640, 655, 660, 670, 680, 685, 690, 695, 699, 705, 715, 730, 735, 740, 745, 755, 760, 765, 770, 785, 790, 795, or 799 contiguous nucleotides) of SEQ ID NO: 67, or a range defined by any two of the foregoing values.

[0122] The adenovirus or adenoviral vector can comprise a nucleic acid sequence comprising at least 188 (e.g., 189 or more, 200 or more, 300 or more, 500 or more, 700 or more, or 900 or more) contiguous nucleotides of SEQ ID NO: 68, but no more than 1,740 (1,700 or less, 1,500 or less, 1,200 or less, or 1,000 or less) contiguous nucleotides of SEQ ID NO: 68. Preferably, the adenovirus or adenoviral vector comprises a nucleic acid sequence comprising 188 to 1,500 contiguous nucleotides (e.g., 200, 400, 600, 800, 1,000, 1,200, or 1,400 contiguous nucleotides), 188 to 1,000 contiguous nucleotides (e.g., 195, 250, 350, 450, 550, 650, 750, 850, or 950 contiguous nucleotides), or 188 to 500 contiguous nucleotides (e.g., 190, 225, 230, 240, 255, 260, 265, 270, 275, 315, 325, 330, 340, 355, 360, 365, 370, 375, 380, 385, 390, 395, 415, 425, 430, 440, 455, 460, 465, 470, 475, 480, 485, 490, 495, or 499 contiguous nucleotides) of SEQ ID NO: 68, or a range defined by any two of the foregoing values.

[0123] The adenovirus or adenoviral vector can comprise one, two, three, four, or all five of the aforementioned sequences alone, or in any combination. In this respect, the adenovirus or adenoviral vector can comprise any combination of any two of the aforementioned sequences, any combination of any three of the aforementioned sequences, any combination of any four of the aforementioned sequences, or all five of the aforementioned sequences. For example, the adenovirus or adenoviral vector can comprise a nucleic acid sequence comprising at least 121 contiguous nucleotides of SEQ ID NO: 64. The adenovirus or adenoviral vector can comprise a nucleic acid sequence comprising at least 234 contiguous nucleotides of SEQ ID NO: 66, and a nucleic acid sequence comprising at least 188 contiguous nucleotides of SEQ ID NO: 68. The adenovirus or adenoviral vector can comprise a nucleic acid sequence comprising at least 462 contiguous nucleotides of SEQ ID NO: 65, a nucleic acid sequence comprising at least 606 contiguous nucleotides of SEQ ID NO: 67, and a nucleic acid sequence comprising at least 188 contiguous nucleotides of SEQ ID NO: 68. The adenovirus or adenoviral vector can comprise a nucleic acid sequence comprising at least 121 contiguous nucleotides of SEQ ID NO: 64, a nucleic acid sequence comprising at least 462 contiguous nucleotides of SEQ ID NO: 65, a nucleic acid sequence comprising at least 234 contiguous nucleotides of SEQ ID NO: 66, and a nucleic acid sequence comprising at least 606 contiguous nucleotides of SEQ ID NO: 67. The adenovirus or adenoviral vector can comprise (a) a nucleic acid sequence comprising at least 121 contiguous nucleotides of SEQ ID NO: 64, (b) a nucleic acid sequence comprising at least 462 contiguous nucleotides of SEQ ID NO: 65, (c) a nucleic acid sequence comprising at least 234 contiguous nucleotides of SEQ ID NO: 66, (d) a nucleic acid sequence comprising at least 606 contiguous nucleotides of SEQ ID NO: 67, and (e) a nucleic acid sequence comprising at least 188 contiguous nucleotides of SEQ ID NO: 68.

[0124] In another embodiment, the adenovirus or adenoviral vector comprises one or more of the following amino acid sequences: (a) an amino acid sequence that is at least 93% identical (e.g., at least 96.57% or 100% identical) to SEQ ID NO: 69, (b) an amino acid sequence that is at least 80% identical (e.g., at least 86.67%, at least 93.33%, or 100% identical) to SEQ ID NO: 71, (c) an amino acid sequence that is at least 92% identical (e.g., at least 97.56% or 100% identical) to SEQ ID NO: 72, and (d) an amino acid sequence that is at least 88% identical (e.g., at least 94.67% or 100% identical) to SEQ ID NO: 73.

[0125] The adenovirus or adenoviral vector can comprise one, two, three, or all four of the aforementioned amino acid sequences alone or in any combination. In this respect, the adenovirus or adenoviral vector can comprise any combination of any two of the aforementioned sequences, any combination of any three of the aforementioned sequences, or all four of the aforementioned sequences. For example, the adenovirus or adenoviral vector can comprise an amino acid sequence that is at least 93% identical to SEQ ID NO: 69. The adenovirus or adenoviral vector can comprise an amino acid sequence that is at least 93% identical to SEQ ID NO: 69, and an amino acid sequence that is at least 80% identical to SEQ ID NO: 71. The adenovirus or adenoviral vector can comprise an amino acid sequence that is at least 93% identical to SEQ ID NO: 69, an amino acid sequence that is at least 80% identical to SEQ ID NO: 71, and an amino acid sequence that is at least 88% identical to SEQ ID NO: 73. The adenovirus or adenoviral vector can comprise (a) the amino acid sequence of SEQ ID NO: 69, (b) the amino acid sequence of SEQ ID NO: 71, (c) the amino acid sequence of SEQ ID NO: 72, or (d) the amino acid sequence of SEQ ID NO: 73. The adenovirus or adenoviral vector can comprise (a) an amino acid sequence that is at least 93% identical to SEQ ID NO: 69, (b) an amino acid sequence that is at least 80% identical to SEQ ID NO: 71, (c) an amino acid sequence that is at least 92% identical to SEQ ID NO: 72, and (d) an amino acid sequence that is at least 88% identical to SEQ ID NO: 73. The adenovirus or adenoviral vector can comprise (a) the amino acid sequence of SEQ ID NO: 69, (b) the amino acid sequence of SEQ ID NO: 71, (c) the amino acid sequence of SEQ ID NO: 72, and (d) the amino acid sequence of SEQ ID NO: 73.

[0126] In another embodiment, the adenovirus or adenoviral vector comprises one or more of the following amino acid sequences: (a) an amino acid sequence that is at least 99% identical (e.g., at least 99.75% or 100% identical) to SEQ ID NO: 74, (b) an amino acid sequence that is at least 97.8% identical (e.g., at least 97.95%, at least 98.10%, at least 98.26%, at least 98.41%, at least 98.56%, at least 98.71%, at least 98.86%, at least 99.02%, at least 99.17%, at least 99.32%, at least 99.47%, at least 99.62%, at least 99.78%, at least 99.93%, or 100% identical) to SEQ ID NO: 76, (c) an amino acid sequence that is at least 99.1% identical (e.g., at least 99.20%, at least 99.31%, at least 99.41%, at least 99.52%, at least 99.62%, at least 99.73%, at least 99.83%, at least 99.94%, or 100% identical) to SEQ ID NO: 77, and (d) an amino acid sequence that is at least 99.2% identical (e.g., at least 99.37%, at least 99.54%, at least 99.72%, at least 99.89%, or 100% identical) to SEQ ID NO: 78.

[0127] The adenovirus or adenoviral vector can comprise one, two, three, or all four of the aforementioned amino acid sequences alone or in any combination. In this respect, the adenovirus or adenoviral vector can comprise any combination of any two of the aforementioned sequences, any combination of any three of the aforementioned sequences, or all four of the aforementioned sequences. For example, the adenovirus or adenoviral vector can comprise an amino acid sequence that is at least 99% identical to SEQ ID NO: 74. The adenovirus or adenoviral vector can comprise an amino acid sequence that is at least 99% identical to SEQ ID NO: 74, and an amino acid sequence that is at least 99.1% identical to SEQ ID NO: 77. The adenovirus or adenoviral vector can comprise an amino acid sequence that is at least 99% identical to SEQ ID NO: 74, an amino acid sequence that is at least 99.1% identical to SEQ ID NO: 77, and an amino acid sequence that is at least 99.2% identical to SEQ ID NO: 78. The adenovirus or adenoviral vector can comprise (a) the amino acid sequence of SEQ ID NO: 74, (b) the amino acid sequence of SEQ ID NO: 76, (c) the amino acid sequence of SEQ ID NO: 77, or (d) the amino acid sequence of SEQ ID NO: 78. The adenovirus or adenoviral vector can comprise (a) an amino acid sequence that is at least 99% identical to SEQ ID NO: 74, (b) an amino acid sequence that is at least 97.8% identical to SEQ ID NO: 76, (c) an amino acid that is at least 99.1% identical to SEQ ID NO: 77, and (d) an amino acid sequence that is at least 99.2% identical to SEQ ID NO: 78. The adenovirus or adenoviral vector can comprise (a) the amino acid sequence of SEQ ID NO: 74, (b) the amino acid sequence of SEQ ID NO: 76, (c) the amino acid sequence of SEQ ID NO: 77, and (d) the amino acid sequence of SEQ ID NO: 78.

[0128] In another embodiment, the adenovirus or adenoviral vector comprises one or more of the following amino acid sequences: (a) an amino acid sequence comprising at least 89 contiguous amino acid residues of SEQ ID NO: 74, (b) an amino acid sequence comprising at least 247 contiguous amino acid residues of SEQ ID NO: 76, (c) an amino acid sequence comprising at least 230 contiguous amino acid residues of SEQ ID NO: 77, and (d) an amino acid sequence comprising at least 231 contiguous amino acid residues of SEQ ID NO: 78.

[0129] The adenovirus or adenoviral vector can comprise an amino acid sequence comprising at least 89 (e.g., 90 or more, 100 or more, or 110 or more) contiguous amino acid residues of SEQ ID NO: 74, but no more than 133 (e.g., 130 or less, 125 or less, 120 or less, or 115 or less) contiguous amino acid residues of SEQ ID NO: 74. Preferably, the adenovirus or adenoviral vector comprises an amino acid sequence comprising 89 to 130 contiguous amino acid residues (e.g., 90, 100, 110, 115, 120, or 125 contiguous amino acid residues) of SEQ ID NO: 74, 89 to 115 contiguous amino acid residues of SEQ ID NO: 74 (e.g., 95, 110, or 112 contiguous amino acid residues), or 89 to 100 contiguous amino acid residues (e.g., 89, 90, 91, 92, 93, 94, 95, 96, 97, 98, or 99 contiguous amino acid residues) of SEQ ID NO: 74, or a range defined by any two of the foregoing values.

[0130] The adenovirus or adenoviral vector can comprise an amino acid sequence comprising at least 247 (e.g., 250 or more, 275 or more, 300 or more, or 400 or more) contiguous amino acid residues of SEQ ID NO: 76, but no more than 658 (e.g., 650 or less, 550 or less, or 450 or less) contiguous amino acid residues of SEQ ID NO: 76. Preferably, the adenovirus or adenoviral vector comprises an acid sequence comprising 247 to 600 contiguous amino acid residues (e.g., 255, 275, 300, 400, or 500 contiguous amino acid residues) of SEQ ID NO: 76, 247 to 500 contiguous amino acid residues of SEQ ID NO: 76 (e.g., 325, 350, 375, 425, 450, or 475 contiguous amino acid residues), or 247 to 400 contiguous amino acid residues (e.g., 265, 280, 285, 290, 295, 360, 365, 380, 385, 390, 395, or 399 contiguous amino acid residues) of SEQ ID NO: 76, or a range defined by any two of the foregoing values.

[0131] The adenovirus or adenoviral vector can comprise an amino acid sequence comprising at least 230 (e.g., 250 or more, 300 or more, 350 or more, 400 or more, or 500 or more) contiguous amino acid residues of SEQ ID NO: 77, but no more than 955 (e.g., 950 or less, 900 or less, 800 or less, 700 or less, or 600 or less) contiguous amino acid residues of SEQ ID NO: 77. Preferably, the adenovirus or adenoviral vector comprises an acid sequence comprising 230 to 800 contiguous amino acid residues (e.g., 240, 260, 270, 280, 290, 300, 350, 390, 400, 500, 600, or 750 contiguous amino acid residues) of SEQ ID NO: 77, 230 to 600 contiguous amino acid residues (e.g., 255, 265, 275, 285, 295, 305, 325, 335, 345, 355, 365, 375, 385, 395, 425, 445, 450, 465, 475, 525, 545, 550, 565 or 575 contiguous amino acid residues) of SEQ ID NO: 77, or 230 to 500 contiguous amino acid residues (e.g., 235, 245, 299, 320, 330, 340, 360, 370, 385, 389, 395, 399, 415, 435, 440, 460, 470, 480, or 499 contiguous amino acid residues) of SEQ ID NO: 77, or a range defined by any two of the foregoing values.

[0132] The adenovirus or adenoviral vector can comprise an amino acid sequence comprising at least 231 (e.g., 250 or more, 300 or more, or 350 or more) contiguous amino acid residues of SEQ ID NO: 78, but no more than 580 (e.g., 575 or less, 550 or less, 500 or less, 450 or less, or 400 or less) contiguous amino acid residues of SEQ ID NO: 78. Preferably, the adenovirus or adenoviral vector comprises an acid sequence comprising 231 to 500 contiguous amino acid residues (e.g., 245, 255, 275, 300, 350, 375, or 400 contiguous amino acid residues) of SEQ ID NO: 78, 231 to 400 contiguous amino acid residues (e.g., 235, 265, 280, 285, 295, 305, 315, 325, 335, 345, 355, 365, 375, 385, 395, or 399 contiguous amino acid residues) of SEQ ID NO: 78, or 231 to 300 contiguous amino acid residues (e.g., 240, 250, 260, 270, or 299 contiguous amino acid residues) of SEQ ID NO: 78, or a range defined by any two of the foregoing values.

[0133] The adenovirus or adenoviral vector can comprise one, two, three, or all four of the aforementioned amino acid sequences alone or in any combination. In this respect, the adenovirus or adenoviral vector can comprise any combination of any two of the aforementioned sequences, any combination of any three of the aforementioned sequences, or all four of the aforementioned sequences. For example, the adenovirus or adenoviral vector can comprise an amino acid sequence comprising at least 89 contiguous amino acid residues of SEQ ID NO: 74. The adenovirus or adenoviral vector can comprise an amino acid sequence comprising at least 89 contiguous amino acid residues of SEQ ID NO: 74, and an amino acid sequence comprising at least 230 contiguous amino acid residues of SEQ ID NO: 77. The adenovirus or adenoviral vector can comprise an amino acid sequence comprising at least 89 contiguous amino acid residues of SEQ ID NO: 74, an amino acid sequence comprising at least 247 contiguous amino acid residues of SEQ ID NO: 76, and an amino acid sequence comprising at least 230 contiguous amino acid residues of SEQ ID NO: 77. The adenovirus or adenoviral vector can comprise an amino acid sequence comprising at least 89 contiguous amino acid residues of SEQ ID NO: 74, an amino acid sequence comprising at least 247 contiguous amino acid residues of SEQ ID NO: 76, and an amino acid sequence comprising at least 231 contiguous amino acid residues of SEQ ID NO: 78. The adenovirus or adenoviral vector can comprise (a) an amino acid sequence comprising at least 89 contiguous amino acid residues of SEQ ID NO: 74, (b) an amino acid sequence comprising at least 247 contiguous amino acid residues of SEQ ID NO: 76, (c) an amino acid sequence comprising at least 230 contiguous amino acid residues of SEQ ID NO: 77, and (d) an amino acid sequence comprising at least 231 contiguous amino acid residues of SEQ ID NO: 78.

[0134] In other embodiments, the adenovirus or adenoviral vector comprises one or more nucleic acid sequences that encode one or more of any of the aforementioned amino acid sequences, e.g., the amino acid sequences of any of SEQ ID NOs: 69-78 or any of the variants and/or portions thereof as described herein. For example, the adenovirus or adenoviral vector can comprise a nucleic acid sequence encoding an amino acid sequence that is at least 99.5% identical (e.g., at least 99.59%, at least 99.69%, at least 99.78%, at least 99.88%, at least 99.97%, or 100% identical) to SEQ ID NO: 75, or a nucleic acid sequence encoding an amino acid sequence that is at least 95% identical (e.g., at least 97.94% or 100% identical) to SEQ ID NO: 70.

[0135] The adenovirus or adenoviral vector can comprise the nucleic acid sequence of, for example, SEQ ID NO: 21, SEQ ID NO: 22, SEQ ID NO: 23, SEQ ID NO: 24, SEQ ID NO: 47, SEQ ID NO: 48, SEQ ID NO: 49, SEQ ID NO: 50, SEQ ID NO: 51, SEQ ID NO: 52, SEQ ID NO: 53, SEQ ID NO: 54, SEQ ID NO: 55, SEQ ID NO: 56, SEQ ID NO: 57, SEQ ID NO: 58, SEQ ID NO: 79, SEQ ID NO: 80, SEQ ID NO: 81, or SEQ ID NO: 82.

[0136] As discussed herein, the adenovirus or adenoviral vector can be replication-competent, conditionally-replicating, or replication-deficient. Preferably, the adenovirus or adenoviral vector is replication-deficient, such that the replication-deficient adenovirus or adenoviral vector requires complementation of at least one replication-essential gene function of one or more regions of the adenoviral genome for propagation (e.g., to form adenoviral vector particles).

[0137] The replication-deficient adenovirus or adenoviral vector can be modified in any suitable manner to cause the deficiencies in the one or more replication-essential gene functions in one or more regions of the adenoviral genome for propagation. The complementation of the deficiencies in the one or more replication-essential gene functions of one or more regions of the adenoviral genome refers to the use of exogenous means to provide the deficient replication-essential gene functions. Such complementation can be effected in any suitable manner, for example, by using complementing cells and/or exogenous DNA (e.g., helper adenovirus) encoding the disrupted replication-essential gene functions.

[0138] The adenovirus or adenoviral vector can be deficient in one or more replication-essential gene functions of only the early regions (i.e., E1-E4 regions) of the adenoviral genome, only the late regions (i.e., L1-L5 regions) of the adenoviral genome, both the early and late regions of the adenoviral genome, or all adenoviral genes (i.e., a high capacity adenovector (HC-Ad). See Morsy et al., Proc. Natl. Acad. Sci. USA, 95: 965-976 (1998); Chen et al., Proc. Natl. Acad. Sci. USA, 94: 1645-1650 (1997); and Kochanek et al., Hum. Gene Ther., 10: 2451-2459 (1999). Examples of replication-deficient adenoviral vectors are disclosed in U.S. Pat. Nos. 5,837,511; 5,851,806; 5,994,106; 6,127,175; 6,482,616; and 7,195,896, and International Patent Application Publications WO 1994/028152, WO 1995/002697, WO 1995/016772, WO 1995/034671, WO 1996/022378, WO 1997/012986, WO 1997/021826, and WO 2003/022311.

[0139] The early regions of the adenoviral genome include the E1, E2, E3, and E4 regions. The E1 region comprises the E1A and E1B subregions, and one or more deficiencies in replication-essential gene functions in the E1 region can include one or more deficiencies in replication-essential gene functions in either or both of the E1A and E1B subregions, thereby requiring complementation of the E1A subregion and/or the E1B subregion of the adenoviral genome for the adenovirus or adenoviral vector to propagate (e.g., to form adenoviral vector particles). The E2 region comprises the E2A and E2B subregions, and one or more deficiencies in replication-essential gene functions in the E2 region can include one or more deficiencies in replication-essential gene functions in either or both of the E2A and E2B subregions, thereby requiring complementation of the E2A subregion and/or the E2B subregion of the adenoviral genome for the adenovirus or adenoviral vector to propagate (e.g., to form adenoviral vector particles).

[0140] The E3 region does not include any replication-essential gene functions, such that a deletion of the E3 region in part or in whole does not require complementation of any gene functions in the E3 region for the adenovirus or adenoviral vector to propagate (e.g., to form adenoviral vector particles). In the context of the invention, the E3 region is defined as the region that initiates with the open reading frame that encodes a protein with high homology to the 12.5K protein from the E3 region of human adenovirus 5 (NCBI reference sequence AP_{—}000218) and ends with the open reading frame that encodes a protein with high homology to the 14.7K protein from the E3 region of human adenovirus 5 (NCBI reference sequence AP_{—}000224.1). The E3 region may be deleted in whole or in part, or retained in whole or in part. The size of the deletion may be tailored so as to retain an adenovirus or adenoviral vector whose genome closely matches the optimum genome packaging size. A larger deletion will accommodate the insertion of larger heterologous nucleic acid sequences in the adenovirus or adenoviral genome. In one embodiment of the invention, the LA polyadenylation signal sequences, which reside in the E3 region, are retained.

[0141] The E4 region comprises multiple open reading frames (ORFs). An adenovirus or adenoviral vector with a deletion of all of the open reading frames of the E4 region except ORF6, and in some cases ORF3, does not require complementation of any gene functions in the E4 region for the adenovirus or adenoviral vector to propagate (e.g., to form adenoviral vector particles). Conversely, an adenovirus or adenoviral vector with a disruption or deletion of ORF6, and in some cases ORF3, of the E4 region (e.g., with a deficiency in a replication-essential gene function based in ORF6 and/or ORF3 of the E4 region), with or without a disruption or deletion of any of the other open reading frames of the E4 region or the native E4 promoter, polyadenylation sequence, and/or the right-side inverted terminal repeat (ITR), requires complementation of the E4 region (specifically, of ORF6 and/or ORF3 of the E4 region) for the adenovirus or adenoviral vector to propagate (e.g., to form adenoviral vector particles).

[0142] The late regions of the adenoviral genome include the L1, L2, L3, LA, and L5 regions. The adenovirus or adenoviral vector also can have a mutation in the major late promoter (MLP), as discussed in International Patent Application Publication WO 2000/000628, which can render the adenovirus or adenoviral vector replication-deficient if desired.

[0143] The one or more regions of the adenoviral genome that contain one or more deficiencies in replication-essential gene functions desirably are one or more early regions of the adenoviral genome, i.e., the E1, E2, and/or E4 regions, optionally with the deletion in part or in whole of the E3 region.

[0144] The replication-deficient adenovirus or adenoviral vector also can have one or more mutations as compared to the wild-type adenovirus (e.g., one or more deletions, insertions, and/or substitutions) in the adenoviral genome that do not inhibit viral replication in host cells. Thus, in addition to one or more deficiencies in replication-essential gene functions, the adenovirus or adenoviral vector can be deficient in other respects that are not replication-essential. For example, the adenovirus or adenoviral vector can have a partial or entire deletion of the adenoviral early region known as the E3 region, which is not essential for propagation of the adenovirus or adenoviral genome.

[0145] In one embodiment, the adenovirus or adenoviral vector is replication-deficient and requires, at most, complementation of the E1 region or the E4 region of the adenoviral genome, for propagation (e.g., to form adenoviral vector particles). Thus, the replication-deficient adenovirus or adenoviral vector requires complementation of at least one replication-essential gene function of the E1A subregion and/or the E1B region of the adenoviral genome (denoted an E1-deficient adenoviral vector) or the E4 region of the adenoviral genome (denoted an E4-deficient adenoviral vector) for propagation (e.g., to form adenoviral vector particles). The adenovirus or adenoviral vector can be deficient in at least one replication-essential gene function (desirably all replication-essential gene functions) of the E1 region of the adenoviral genome and at least one gene function of the nonessential E3 region of the adenoviral genome (denoted an E1/E3-deficient adenoviral vector). The adenovirus or adenoviral vector can be deficient in at least one replication-essential gene function (desirably all replication-essential gene functions) of the E4 region of the adenoviral genome and at least one gene function of the nonessential E3 region of the adenoviral genome (denoted an E3/E4-deficient adenoviral vector).

[0146] In one embodiment, the adenovirus or adenoviral vector is replication-deficient and requires, at most, complementation of the E2 region, preferably the E2A subregion, of the adenoviral genome, for propagation (e.g., to form adenoviral vector particles). Thus, the replication-deficient adenovirus or adenoviral vector requires complementation of at least one replication-essential gene function of the E2A subregion of the adenoviral genome (denoted an E2A-deficient adenoviral vector) for propagation (e.g., to form adenoviral vector particles). The adenovirus or adenoviral vector can be deficient in at least one replication-essential gene function (desirably all replication-essential gene functions) of the E2A region of the adenoviral genome and at least one gene function of the nonessential E3 region of the adenoviral genome (denoted an E2A/E3-deficient adenoviral vector).

[0147] In one embodiment, the adenovirus or adenoviral vector is replication-deficient and requires, at most, complementation of the E1 and E4 regions of the adenoviral genome for propagation (e.g., to form adenoviral vector particles). Thus, the replication-deficient adenovirus or adenoviral vector requires complementation of at least one replication-essential gene function of both the E1 and E4 regions of the adenoviral genome (denoted an E1/E4-deficient adenoviral vector) for propagation (e.g., to form adenoviral vector particles). The adenovirus or adenoviral vector can be deficient in at least one replication-essential gene function (desirably all replication-essential gene functions) of the E1 region of the adenoviral genome, at least one replication-essential gene function of the E4 region of the adenoviral genome, and at least one gene function of the nonessential E3 region of the adenoviral genome (denoted an E1/E3/E4-deficient adenoviral vector). The adenovirus or adenoviral vector preferably requires, at most, complementation of the E1 region of the adenoviral genome for propagation, and does not require complementation of any other deficiency of the adenoviral genome for propagation. More preferably, the adenovirus or adenoviral vector requires, at most, complementation of the E1 and E4 regions of the adenoviral genome for propagation, and does not require complementation of any other deficiency of the adenoviral genome for propagation.

[0148] The adenovirus or adenoviral vector, when deficient in multiple replication-essential gene functions of the adenoviral genome (e.g., an E1/E4-deficient adenoviral vector), can include a spacer sequence to provide viral growth in a complementing cell line similar to that achieved by adenoviruses or adenoviral vectors deficient in a single replication-essential gene function (e.g., an E1-deficient adenoviral vector). The spacer sequence can contain any nucleotide sequence or sequences which are of a desired length, such as sequences at least about 15 base pairs (e.g., between about 15 nucleotides and about 12,000 nucleotides), preferably about 100 nucleotides to about 10,000 nucleotides, more preferably about 500 nucleotides to about 8,000 nucleotides, even more preferably about 1,500 nucleotides to about 6,000 nucleotides, and most preferably about 2,000 to about 3,000 nucleotides in length, or a range defined by any two of the foregoing values. The spacer sequence can be coding or non-coding and native or non-native with respect to the adenoviral genome, but does not restore the replication-essential function to the deficient region. The spacer also can contain an expression cassette. More preferably, the spacer comprises a polyadenylation sequence and/or a gene that is non-native with respect to the adenovirus or adenoviral vector. The use of a spacer in an adenoviral vector is further described in, for example, U.S. Pat. No. 5,851,806 and International Patent Application Publication WO 1997/021826.

[0149] By removing all or part of the adenoviral genome, for example, the E1, E3, and E4 regions of the adenoviral genome, the resulting adenovirus or adenoviral vector is able to accept inserts of exogenous nucleic acid sequences while retaining the ability to be packaged into adenoviral capsids. An exogenous nucleic acid sequence can be inserted at any position in the adenoviral genome so long as insertion in the position allows for the formation of adenovirus or the adenoviral vector particle. The exogenous nucleic acid sequence preferably is positioned in the E1 region, the E3 region, or the E4 region of the adenoviral genome.

[0150] The replication-deficient adenovirus or adenoviral vector of the invention can be produced in complementing cell lines that provide gene functions not present in the replication-deficient adenovirus or adenoviral vector, but required for viral propagation, at appropriate levels in order to generate high titers of viral vector stock. Such complementing cell lines are known and include, but are not limited to, 293 cells (described in, e.g., Graham et al., J. Gen. Virol., 36: 59-72 (1977)), PER.C6 cells (described in, e.g., International Patent Application Publication WO 1997/000326, and U.S. Pat. Nos. 5,994,128 and 6,033,908), and 293-ORF6 cells (described in, e.g., International Patent Application Publication WO 1995/034671 and Brough et al., J. Virol., 71: 9206-9213 (1997)). Other suitable complementing cell lines to produce the replication-deficient adenovirus or adenoviral vector of the invention include complementing cells that have been generated to propagate adenoviral vectors encoding transgenes whose expression inhibits viral growth in host cells (see, e.g., U.S. Patent Application Publication 2008/0233650). Additional suitable complementing cells are described in, for example, U.S. Pat. Nos. 6,677,156 and 6,682,929, and International Patent Application Publication WO 2003/020879. In some instances, the cellular genome need not comprise nucleic acid sequences, the gene products of which complement for all of the deficiencies of a replication-deficient adenoviral vector. One or more replication-essential gene functions lacking in a replication-deficient adenoviral vector can be supplied by a helper virus, e.g., an adenoviral vector that supplies in trans one or more essential gene functions required for replication of the replication-deficient adenovirus or adenoviral vector. Alternatively, the inventive adenovirus or adenoviral vector can comprise a non-native replication-essential gene that complements for the one or more replication-essential gene functions lacking in the inventive replication-deficient adenovirus or adenoviral vector. For example, an E1/E4-deficient adenoviral vector can be engineered to contain a nucleic acid sequence encoding E4 ORF 6 that is obtained or derived from a different adenovirus (e.g., an adenovirus of a different serotype than the inventive adenovirus or adenoviral vector, or an adenovirus of a different species than the inventive adenovirus or adenoviral vector).

[0151] The adenovirus or adenoviral vector can further comprise a transgene. The term “transgene” is defined herein as a non-native nucleic acid sequence that is operably linked to appropriate regulatory elements (e.g., a promoter), such that the non-native nucleic acid sequence can be expressed to produce a protein (e.g., peptide or polypeptide). The regulatory elements (e.g., promoter) can be native or non-native to the adenovirus or adenoviral vector.

[0152] A “non-native” nucleic acid sequence is any nucleic acid sequence (e.g., DNA, RNA, or cDNA sequence) that is not a naturally occurring nucleic acid sequence of an adenovirus in a naturally occurring position. Thus, the non-native nucleic acid sequence can be naturally found in an adenovirus, but located at a non-native position within the adenoviral genome and/or operably linked to a non-native promoter. The terms “non-native nucleic acid sequence,” “heterologous nucleic acid sequence,” and “exogenous nucleic acid sequence” are synonymous and can be used interchangeably in the context of the invention. The non-native nucleic acid sequence preferably is DNA and preferably encodes a protein (i.e., one or more nucleic acid sequences encoding one or more proteins).

[0153] The adenovirus or adenoviral vector preferably comprises at least one non-native nucleic acid that encodes an antigen of Plasmodium. An “antigen” is a molecule that triggers an immune response in a mammal. An “immune response” can entail, for example, antibody production and/or the activation of immune effector cells. An antigen in the context of the invention can comprise any subunit, fragment, or epitope of any proteinaceous or non-proteinaceous (e.g., carbohydrate or lipid) molecule which provokes an immune response in a mammal. By “epitope” is meant a sequence of an antigen that is recognized by an antibody or an antigen receptor. Epitopes also are referred to in the art as “antigenic determinants.”

[0154] A Plasmodium antigen in the context of the invention can comprise any proteinaceous Plasmodium molecule or portion thereof that provokes a Plasmodium-related immune response in a mammal. A “Plasmodium molecule” is a molecule that is a part of a Plasmodium parasite, is encoded by a nucleic acid sequence of a Plasmodium parasite, or is derived from or synthetically based upon any such molecule. Administration of a Plasmodium antigen that provokes an immune response in accordance with the invention preferably leads to protective immunity against Plasmodium. In this regard, an “immune response” to Plasmodium is an immune response to any one or more Plasmodium antigens.

[0155] The antigen can be from any suitable Plasmodium species, but preferably is from a Plasmodium species that infects humans and causes malaria. Human-infecting Plasmodium species include P. malariae, P. ovale, P. vivax, and P. falciparum. P. vivax and P. falciparum are the most common, and P. falciparum is the most deadly, species of Plasmodium in human. Alternatively, the antigen can be from a species of Plasmodium that infects non-human animals. For example, P. vinckei, P. chabaudi, P. yoelii, and P. berghei infect rodents. P. knowlesi, P. cynomolgi, P. simiovale, P. fieldi, P. inui, and P. brasilianum infect non-human primates. P. gallinaceum infects birds. In order to advance vaccine discovery, the genomes of a number of Plasmodium species have been sequenced. For example, the complete P. falciparum genome has been sequenced and is disclosed in Gardner et al., Nature, 419: 498-511 (2002). In addition, the complete P. yoelii genome sequence is disclosed in Carlton et al., Nature, 419: 512-9 (2002). Thus, one of ordinary skill in the art can identify and isolate an appropriate Plasmodium antigen using routine methods known in the art.

[0156] The heterologous nucleic acid sequence can encode any suitable P. falciparum antigen, but preferably encodes an antigen that is expressed during the blood-stage of infection (a “blood-stage antigen”) and/or an antigen that is expressed during the pre-erythrocytic stage of infection (a “pre-erythrocytic stage antigen”). Blood-stage antigens and pre-erythrocytic stage antigens activate the humoral (i.e., antibody-mediated) and cell-mediated (i.e., T cell) arms of the immune system. Suitable pre-erythrocytic stage antigens include, but are not limited to, circumsporozoite protein (CSP), sporozoite surface protein 2 (SSP2) (also known as thrombospondin-related anonymous protein (TRAP)), liver-stage antigen 1 (LSA-1), Pf exported protein 1 (P/Exp-1), and Pf Antigen 2 (also known as CelTos). Preferred pre-erythrocytic stage antigens include CSP, SSP2, and CelTos. Nucleic acid sequences encoding P. falciparum CSP are disclosed in, e.g., Jongwutiwes et al., Am. J. Trop. Med. Hyg., 51(5): 659-668 (1994), Dame et al., Science, 225: 593-599 (1984), and del Portillo et al., Mol. Biochem., Parasitol., 24(3): 289-294 (1987), and are publicly available (see, e.g., GenBank Accession Nos. M83161.1, M83156.1, M83152.1, M83149.1, M83173.1, M83170.1, M83168.1, M83166.1, M83164.1, and M60972.1). Nucleic acid sequences encoding P. falciparum SSP2 protein are publicly available (see, e.g., GenBank Accession Nos. AF249739.1 and XM_{—}001350052). Nucleic acid sequences encoding P. falciparum CelTos protein are publicly available (see, e.g., GenBank Accession No. XM_{—}001350533.1).

[0157] Suitable blood-stage antigens include, but are not limited to, merozoite surface protein 1 (MSP-1), merozoite surface protein 2 (MSP-2), erythrocyte binding antigen 175 (EBA-175), ring-infected erythrocyte surface antigen (RESA), serine repeat antigen (SERA), glycophorin binding protein (GBP-130), histidine rich protein 2 (HRP-2), rhoptry-associated proteins 1 and 2 (RAP-1 and RAP-2), erythrocyte membrane protein I (PEMP 1), and apical membrane antigen 1 (AMA-1). Preferably, the blood-stage antigen is AMA-1. Nucleic acid sequences encoding P. falciparum AMA-1 protein are publicly available (see, e.g., GenBank Accession No. AF277003.1)

[0158] In a preferred embodiment, the Plasmodium-encoding nucleic acid sequence comprises codons expressed more frequently (and preferably, most frequently) in humans than in Plasmodium. While the genetic code is generally universal across species, the choice among synonymous codons is often species-dependent. One of ordinary skill in the art would appreciate that, to achieve maximum protection against Plasmodium infection, the adenovirus or adenoviral vector must be capable of expressing high levels of Plasmodium antigens in a mammalian, preferably a human, host. In this respect, the nucleic acid sequence preferably encodes the native amino acid sequence of a Plasmodium antigen, but comprises codons that are expressed more frequently in mammals (e.g., humans) than in Plasmodium, and lacks cis signals that are inhibitory to high level expression of the Plasmodium antigen. Changing native Plasmodium codons to the most frequently used in mammals will increase expression of the Plasmodium antigen in a mammal (e.g., a human). Such modified nucleic acid sequences are commonly described in the art as “humanized,” as “codon-optimized,” or as utilizing “mammalian-preferred” or “human-preferred” codons.

[0159] In the context of the invention, a Plasmodium nucleic acid sequence is said to be “codon-optimized” if at least about 60% (e.g., at least about 70%, at least about 80%, or at least about 90%) of the wild-type codons in the nucleic acid sequence are modified to encode mammalian-preferred codons. That is, a Plasmodium nucleic acid sequence is codon-optimized if at least about 60% of the codons in the nucleic acid sequence are mammalian-preferred codons. Additionally and alternatively, the codon-optimized nucleic acid sequence encoding a Plasmodium antigen can be any sequence that hybridizes to an above-described sequence under at least moderate, preferably high, stringency conditions, such as described in, e.g., Sambrook et al., Molecular Cloning, a Laboratory Manual, 3rd edition, Cold Spring Harbor Press, Cold Spring Harbor, N.Y. (2001). Determining the degree of homology can be accomplished using any suitable method known in the art, such as those described herein.

[0160] In addition to the nucleic acid encoding a Plasmodium antigen, the adenovirus or adenoviral vector preferably comprises expression control sequences, such as promoters, enhancers, polyadenylation signals, transcription terminators, internal ribosome entry sites (IRES), and the like, that provide for the expression of the nucleic acid sequence in a host cell. Exemplary expression control sequences are known in the art and are described in, for example, Goeddel, Gene Expression Technology: Methods in Enzymology, Vol. 185, Academic Press, San Diego, Calif. (1990). Ideally, the Plasmodium antigen-encoding nucleic acid sequence is operably linked to a promoter and a polyadenylation sequence. The promoter desirably is a constitutive or inducible promoter, preferably a constitutive promoter, A large number of promoters, including constitutive, inducible, and repressible promoters, from a variety of different sources are well known in the art. Representative sources of promoters include for example, virus, mammal, insect, plant, yeast, and bacteria, and suitable promoters from these sources are readily available, or can be made synthetically, based on sequences publicly available, for example, from depositories such as the ATCC as well as other commercial or individual sources. Promoters can be unidirectional (i.e., initiate transcription in one direction) or bi-directional (i.e., initiate transcription in either a 3′ or 5′ direction). Non-limiting examples of promoters include, for example, the T7 bacterial expression system, pBAD (araA) bacterial expression system, the cytomegalovirus (CMV) promoter (human or mouse), the β-actin promoter (human or chicken), the EF1-α promoter, the ubiquitin promoter, the SV40 promoter, and the Rous Sarcoma Virus promoter. Inducible promoters include, for example, the Tet system (U.S. Pat. Nos. 5,464,758 and 5,814,618), the Ecdysone inducible system (No et al., Proc. Natl. Acad. Sci., 93: 3346-3351 (1996)), the T-REx™ system (Invitrogen, Carlsbad, Calif.), LACSWITCH™ system (Stratagene, San Diego, Calif.), and the Cre-ERT tamoxifen inducible recombinase system (Indra et al., Nuc. Acid. Res., 27: 4324-4327 (1999); Nuc. Acid. Res., 28: e99 (2000); U.S. Pat. No. 7,112,715; and Kramer & Fussenegger, Methods Mol. Biol., 308: 123-144 (2005)).

[0161] A promoter can be selected by matching its particular pattern of activity with the desired pattern and level of expression of an antigen(s). For example, the adenovirus or adenoviral vector can comprise two or more nucleic acid sequences that encode the same or different antigens and are operably linked to different promoters displaying distinct expression profiles. In this regard, a first promoter can be selected to mediate an initial peak of antigen production, thereby priming the immune system against an encoded antigen. A second promoter can be selected to drive production of the same or different antigen such that expression peaks several days after that of the first promoter, thereby “boosting” the immune system against the antigen. Alternatively, a hybrid promoter can be constructed which combines the desirable aspects of multiple promoters. For example, a CMV-Rous Sarcoma Virus hybrid promoter combining the CMV promoter's initial rush of activity with the Rous Sarcoma Virus promoter's high maintenance level of activity can be employed. In that antigens can be toxic to eukaryotic cells, it may be advantageous to modify the promoter to decrease activity in complementing cell lines used to propagate the adenovirus or adenoviral vector.

[0162] To optimize protein production, preferably the antigen-encoding nucleic acid sequence further comprises a polyadenylation site following the coding sequence. Any suitable polyadenylation sequence can be used, including a synthetic optimized sequence, as well as the polyadenylation sequence of BGH (Bovine Growth Hormone), polyoma virus, TK (Thymidine Kinase), EBV (Epstein Barr Virus), mouse globin D protein, and the papillomaviruses, including human papillomaviruses and BPV (Bovine Papilloma Virus). A preferred polyadenylation sequence is the SV40 (Human Sarcoma Virus-40) polyadenylation sequence. Also, preferably all the proper transcription signals (and translation signals, where appropriate) are correctly arranged such that the nucleic acid sequence is properly expressed in the cells into which it is introduced. If desired, the nucleic acid sequence also can incorporate splice sites (i.e., splice acceptor and splice donor sites) to facilitate mRNA production.

[0163] If the Plasmodium antigen-encoding nucleic acid sequence encodes a processed or secreted protein or peptide, or a protein that acts intracellularly, preferably the Plasmodium antigen-encoding nucleic acid sequence further comprises the appropriate sequences for processing, secretion, intracellular localization, and the like. The Plasmodium antigen-encoding nucleic acid sequence can be operably linked to a signal sequence, which targets a protein to cellular machinery for secretion. Appropriate signal sequences include, but are not limited to, leader sequences for immunoglobulin heavy chains and cytokines (see, for example, Ladunga et al., Current Opinions in Biotechnology, 11: 13-18 (2000)). Other protein modifications can be required to secrete a protein from a host cell, which can be determined using routine laboratory techniques. Preparing expression constructs encoding antigens and signal sequences is further described in, for example, U.S. Pat. No. 6,500,641. Methods of secreting non-secretable proteins are further described in, for example, U.S. Pat. No. 6,472,176, and International Patent Application Publication WO 2002/048377.

[0164] A Plasmodium antigen encoded by the nucleic acid sequence of the adenovirus or adenoviral vector also can be modified to attach or incorporate the antigen on a host cell surface. In this respect, the antigen can comprise a membrane anchor, such as a gpi-anchor, for conjugation onto a cell surface. A transmembrane domain can be fused to the antigen to incorporate a terminus of the antigen protein into the cell membrane. Other strategies for displaying peptides on a cell surface are known in the art and are appropriate for use in the context of the invention.

[0165] The invention provides a composition comprising the adenovirus or adenoviral vector described herein and a carrier therefor (e.g., a pharmaceutically acceptable carrier). The composition desirably is a physiologically acceptable (e.g., pharmaceutically acceptable) composition, which comprises a carrier, preferably a physiologically (e.g., pharmaceutically) acceptable carrier, and the adenovirus or adenoviral vector. Any suitable carrier can be used within the context of the invention, and such carriers are well known in the art. The choice of carrier will be determined, in part, by the particular use of the composition (e.g., administration to an animal) and the particular method used to administer the composition. Ideally, in the context of replication-deficient adenoviral vectors, the pharmaceutical composition preferably is free of replication-competent adenovirus. The pharmaceutical composition optionally can be sterile.

[0166] Suitable compositions include aqueous and non-aqueous isotonic sterile solutions, which can contain anti-oxidants, buffers, and bacteriostats, and aqueous and non-aqueous sterile suspensions that can include suspending agents, solubilizers, thickening agents, stabilizers, and preservatives. The composition can be presented in unit-dose or multi-dose sealed containers, such as ampules and vials, and can be stored in a freeze-dried (lyophilized) condition requiring only the addition of the sterile liquid carrier, for example, water, immediately prior to use. Extemporaneous solutions and suspensions can be prepared from sterile powders, granules, and tablets. Preferably, the carrier is a buffered saline solution. More preferably, the adenovirus or adenoviral vector is part of a composition formulated to protect the adenovirus or adenoviral vector from damage prior to administration. For example, the composition can be formulated to reduce loss of the adenovirus or adenoviral vector on devices used to prepare, store, or administer the adenovirus or adenoviral vector, such as glassware, syringes, or needles. The composition can be formulated to decrease the light sensitivity and/or temperature sensitivity of the adenovirus or adenoviral vector. To this end, the composition preferably comprises a pharmaceutically acceptable liquid carrier, such as, for example, those described above, and a stabilizing agent selected from the group consisting of polysorbate 80, L-arginine, polyvinylpyrrolidone, trehalose, and combinations thereof. Use of such a composition will extend the shelf life of the adenovirus or adenoviral vector, and facilitate its administration. Formulations for adenovirus or adenoviral vector-containing compositions are further described in, for example, U.S. Pat. No. 6,225,289, U.S. Pat. No. 6,514,943, and International Patent Application Publication WO 2000/034444.

[0167] The composition also can be formulated to enhance transduction efficiency. In addition, one of ordinary skill in the art will appreciate that the adenovirus or adenoviral vector can be present in a composition with other therapeutic or biologically-active agents. For example, factors that control inflammation, such as ibuprofen or steroids, can be part of the composition to reduce swelling and inflammation associated with in vivo administration of the adenovirus or adenoviral vector. Antibiotics, i.e., microbicides and fungicides, can be present to treat existing infection and/or reduce the risk of future infection, such as infection associated with gene transfer procedures.

[0168] The invention further provides a method of inducing an immune response against Plasmodium falciparum in a mammal. The method comprises administering to the mammal the inventive adenovirus or adenoviral vector alone, preferably the inventive composition comprising the adenovirus or adenoviral vector and a pharmaceutically acceptable carrier, whereupon the nucleic acid sequence encoding the Plasmodium antigen is expressed in the mammal to produce the Plasmodium antigen and thereby induce an immune response against Plasmodium falciparum in the mammal. In accordance with the invention, the composition is administered to a mammal, most preferably a human, wherein the Plasmodium antigen-encoding nucleic acid sequence is expressed to induce an immune response against Plasmodium falciparum in the mammal. The human preferably is in a population that has a high risk of acquiring Plasmodium falciparum. Such high-risk populations include residents of parts of Africa, Asia, the Middle East, Central and South America, Hispaniola, and Oceania, as well as military personnel deployed to these areas.

[0169] The immune response can be a humoral immune response, a cell-mediated immune response, or, desirably, a combination of humoral and cell-mediated immunity. Ideally, the immune response provides protection to the animal, typically a mammal such as a human, upon subsequent challenge with Plasmodium. However, protective immunity is not required in the context of the invention. The inventive method also can be used for antibody production and harvesting.

[0170] To enhance the immune response generated against a Plasmodium antigen, the composition also can comprise an immune stimulator, or a nucleic acid sequence that encodes an immune stimulator. Immune stimulators also are referred to in the art as “adjuvants,” and include, for example, cytokines, chemokines, or chaperones. Cytokines include, for example, Macrophage Colony Stimulating Factor (e.g., GM-CSF), Interferon Alpha (IFN-α), Interferon Beta (IFN-β), Interferon Gamma (IFN-γ), interleukins (IL-1, IL-2, IL-4, IL-5, IL-6, IL-8, IL-10, IL-12, IL-13, IL-15, IL-16, and IL-18), the TNF family of proteins, Intercellular Adhesion Molecule-1 (ICAM-1), Lymphocyte Function-Associated antigen-3 (LFA-3), B7-1, B7-2, FMS-related tyrosine kinase 3 ligand, (Flt3L), vasoactive intestinal peptide (VIP), and CD40 ligand. Chemokines include, for example, B Cell-Attracting chemokine-1 (BCA-1), Fractalkine, Melanoma Growth Stimulatory Activity (MGSA) protein, Hemofiltrate CC chemokine 1 (HCC-1), Interleukin 8 (IL-8), Interferon-stimulated T-cell alpha chemoattractant (I-TAC), Lymphotactin, Monocyte Chemotactic Protein I (MCP-1), Monocyte Chemotactic Protein 3 (MCP-3), Monocyte Chemotactic Protein 4 (CP-4), Macrophage-Derived Chemokine (MDC), a macrophage inflammatory protein (MIP), Platelet Factor 4 (PF4), RANTES, BRAK, eotaxin, exodus 1-3, and the like. Chaperones include, for example, the heat shock proteins Hsp170, Hsc70, and Hsp40.

[0171] The composition ideally comprises an “effective amount” of adenoviral vector, i.e., a dose of adenoviral vector which provokes a desired immune response in the mammal. Desirably, a single dose of adenoviral vector comprises about 1×10⁵ or more particles (which also are referred to as particle units (pu)) of the adenoviral vector, e.g., about 1×10⁶ or more particles, about 1×10⁷ or more particles, about 1×10⁸ or more particles, about 1×10⁹ or more particles, or about 3×10⁸ or more particles of the adenoviral vector. Alternatively, or in addition, a single dose of adenoviral vector comprises about 3×10¹⁴ particles or less of the adenoviral vector, e.g., about 1×10¹³ particles or less, about 1×10¹² particles or less, about 3×10¹¹ particles or less, about 1×10¹¹ particles or less, about 1×10¹⁰ particles or less, or about 1×10⁹ particles or less of the adenoviral vector. Thus, a single dose of adenoviral vector can comprise a quantity of particles of the adenoviral vector in a range defined by any two of the aforementioned values. For example, a single dose of adenoviral vector can comprise 1×10⁵-1×10⁴ particles, 1×107-1×10¹² particles, 1×10⁸-1×10¹¹ particles, 3×10⁸-3×10¹¹ particles, 1×10⁹-1×10¹² particles, 1×10⁹-1×10¹¹ particles, 1×10⁹-1×10¹⁰ particles, or 1×10¹⁰-1×10¹² particles, of the adenoviral vector. In other words, a single dose of adenoviral vector can comprise, for example, about 1×10⁶ pu, 2×10⁶ pu, 4×10⁶ pu, 1×10⁷ pu, 2×10⁷ pu, 4×10⁷ pu, 1×10⁸ pu, 2×10⁸ pu, 3×10⁸ pu, 4×10⁸ pu, 1×10⁹ pu, 2×10⁹ pu, 3×10⁹ pu, 4×10⁹ pu, 1×10¹⁰ pu, 2×10¹⁰ pu, 3×10¹⁰ pu, 4×10¹⁰ pu, 1×10¹¹ pu, 2×10¹¹ pu, 3×10¹¹ pu, 4×10¹¹ pu, 1×10¹² pu, 2×10¹² pu, 3×10¹² pu, or 4×10¹² pu of the adenoviral vector.

[0172] Administration of the composition containing the adenovirus or adenoviral vector can be one component of a multistep regimen for inducing an immune response against Plasmodium falciparum in a mammal. In this respect, the method of inducing an immune response can further comprise administering to the mammal a boosting composition after administering the adenovirus or adenoviral vector to the mammal. In this embodiment, therefore, the immune response is “primed” upon administration of the composition containing the adenovirus or adenoviral vector, and is “boosted” upon administration of the boosting composition. Alternatively, the inventive method further comprises administering to the mammal a priming composition to the mammal prior to administering the adenovirus or adenoviral vector to the mammal. In this embodiment, therefore, the immune response is “primed” upon administration of the priming composition, and is “boosted” upon administration of the composition containing the adenovirus or adenoviral vector.

[0173] At least one of the priming composition and the boosting composition comprises an inventive adenovirus or adenoviral vector, while the other of the priming composition and the boosting composition can comprise the inventive adenovirus or adenoviral vector (which can be the same or different) or a different effective agent, though desirably a gene transfer vector that comprises a nucleic acid sequence encoding a Plasmodium antigen. Any gene transfer vector can be employed, including viral and non-viral gene transfer vectors. Examples of suitable viral gene transfer vectors include, but are not limited to, retroviral vectors, adeno-associated virus vectors, vaccinia virus vectors, herpesvirus vectors, parainfluenza-RSV chimeric vectors (PIV-RSV), and adenoviral vectors. Examples of suitable non-viral vectors include, but are not limited to, plasmids, liposomes, and molecular conjugates (e.g., transferrin). Preferably, the priming composition or the boosting composition comprises a plasmid or an adenoviral vector. Alternatively, an immune response can be primed or boosted by administration of a Plasmodium protein itself (e.g., an antigenic Plasmodium protein) with or without a suitable adjuvant (e.g., alum, QS-21, insulin-derived adjuvant, etc.), a live-attenuated Plasmodium parasite, and the like. When the priming composition or the boosting composition comprises an adenovirus or an adenoviral vector other than the inventive adenovirus or adenoviral vector, the adenovirus or adenoviral vector can be, or can be derived from, any adenovirus that infects a human or non-human animal, which are well known in the art. In this respect, the priming composition or the boosting composition can comprise a human adenoviral vector (e.g., serotype 5, 28, or 35), a simian adenoviral vector (such as described in, e.g., International Patent Application Publication WO 2011/057254), or a gorilla adenoviral vector. For example, a priming composition containing a human serotype 5 adenoviral vector can be administered to a human, followed by administration of a boosting composition containing the inventive adenovirus or adenoviral vector described herein (i.e., a “heterologous” prime-boost regimen). Alternatively, a priming composition containing the inventive adenovirus or adenoviral vector described herein can be administered to a human, followed by administration of a boosting composition containing a human serotype 5 adenoviral vector. In another embodiment, a priming composition containing the inventive adenovirus or adenoviral vector described herein can be administered to a human, followed by a second administration of the same composition (i.e., a “homologous” prime-boost regimen). One of ordinary skill in the art will appreciate that any combination of human and/or non-human adenoviruses and adenoviral vectors encoding one or more Plasmodium antigens can be employed as the priming and/or boosting compositions in conjunction with the inventive adenovirus or adenoviral vector described herein.

[0174] When a gene transfer vector other than the inventive adenovirus or adenoviral vector is utilized in the priming composition and/or the boosting composition, such gene transfer vector comprises at least one nucleic acid sequence encoding a Plasmodium antigen. The Plasmodium antigen encoded by the nucleic acid sequence of such a gene transfer vector can be the same as the Plasmodium antigen encoded by the inventive adenovirus or adenoviral vector. Alternatively, the Plasmodium antigen encoded by the nucleic acid sequence of such a gene transfer vector can be different from the Plasmodium antigen encoded by the inventive adenovirus or adenoviral vector. In one embodiment, such a gene transfer vector of the priming composition and/or the boosting composition comprises multiple (i.e., two or more) nucleic acid sequences encoding the same Plasmodium antigen, as described herein. In another embodiment, such a gene transfer vector of the priming composition and/or the boosting composition can comprise multiple nucleic acid sequences encoding two or more different Plasmodium antigens, as described herein.

[0175] Administration of the priming composition and the boosting composition can be separated by any suitable timeframe (e.g., at least any of about 1 week, 2 weeks, 4 weeks, 8 weeks, 12 weeks, 16 weeks, 24 weeks, 52 weeks, 2 years, and 5 years, or any range defined by any two of the foregoing values). The boosting composition preferably is administered to a mammal (e.g., a human) at least about 2 weeks (e.g., at least any of about 3 weeks, 4 weeks, 5 weeks, 6 weeks, 7 weeks, 8 weeks, 9 weeks, 10 weeks, 11 weeks, 12 weeks, 13 weeks, 14 weeks, 15 weeks, 16 weeks, 20 weeks, 24 weeks, 28 weeks, 35 weeks, 40 weeks, 50 weeks, 52 weeks, 2 years, and 5 years, or any range defined by any two of the foregoing values) following administration of the priming composition. More than one dose of priming composition and/or boosting composition can be provided in any suitable timeframe. The dose of the priming composition and boosting composition administered to the mammal depends on a number of factors, including the extent of any side-effects, the particular route of administration, and the like.

[0176] The following examples further illustrate the invention but, of course, should not be construed as in any way limiting its scope.

### Example 1

[0177] This example demonstrates the immunogenicity of an inventive adenoviral vector encoding a Plasmodium yoelii circumsporozoite protein (PyCSP) in mice.

[0178] Three adenoviruses were prepared. Specifically, adenoviruses having the nucleic acid sequence of SEQ ID NO: 22, SEQ ID NO: 52, or SEQ ID NO: 80 were modified by genetic engineering to (1) be rendered replication-deficient by deletion of the E1 region, and (2) express a codon-optimized version of the Plasmodium yoelii circumsporozoite protein which lacks the C-terminal gpi anchor domain (PyCSPo).

[0179] More specifically, a nucleic acid sequence encoding PyCSP was introduced between a CMVtetO promoter and the SV40 early polyA. The CMVtetO promoter combines the CMV immediate early high expression enhancer/promoter with tetracycline operator sites. Within this sequence is the viral enhancer, CAAT box, TATA box, two copies of the 20 nucleotide tetracycline operator sequence (tetO) from transposon Tn10, and the CMV transcription start site. The tetO sites are inactive in mammalian cells since tetracycline-based gene expression regulation is specific for a prokaryotic system (see, e.g., Blau et al., Proc. Natl. Acad. Sci USA., 96(3): 797-799 (1999)). The tetO sites inhibit transgene expression when the viral vector is propagated in a cell line in the presence of the tetracycline repressor. To further optimize the expression of the PyCSP nucleic acid sequence from the CMVtetO promoter, an artificial intron was created in the sequence by placing a splice donor and a splice acceptor sequence upstream of the PyCSP initiation codon. The resulting adenoviral vectors were designated GC44PyCSP.o, GC45PyCSP.o, and GC46PyCSP.o.

[0180] Balb/c mice were divided into groups (six mice per group), and each group was administered one of three doses of each of GC44PyCSP.o, GC45PyCSP.o, and GC46PyCSP.o (i.e., 1×10⁷ pu, 1×10⁸ pu, or 1×10⁹ pu), or an E1/E3/E4-deficient serotype 5 adenoviral vector comprising the PyCSP.o construct (“Ad5PyCSP.o”). Animals receiving an E1/E3/E4-deficient serotype 5 adenoviral vector lacking a transgene (“AdNull”) served as a negative control.

[0181] Three weeks following vector administration, T-cell responses were assessed by intracellular cytokine staining (ICS) of individual mice splenocytes. Targets were MHC-matched A20.2J cells pulsed with synthetic peptides representing the immunodominant CD8+ T cell epitope (PyCSP280-288), a subdominant epitope (PyCSP57-70), or a defined CD8+ T cell epitope for hemagglutinin (HA 332-340). The results of this analysis are set forth in FIGS. 1-3. At the 1×10⁸ pu dose level, GC44PyCSP.o and GC45PyCSP.o induced significantly higher CD8+ T cell levels in mice than did Ad5PyCSP.o. At the 1×10⁷ pu and 1×10⁸ pu dose levels, GC46PyCSP.o induced significantly higher CD8+ T cell levels in mice than did Ad5PyCSP.o. At the 1×10⁹ pu dose, GC46PyCSP.o and Ad5PyCSP.o induced similar CD8+ T cell responses in mice.

[0182] Antigen-specific antibody titers were evaluated in serum from the treated mice via ELISA. In particular, full length PyCSP protein was adsorbed to 96-well Immulon 4HBX plates at a concentration of 0.1 g/ml. Bound antibodies were detected using alkaline phosphatase labeled anti-mouse IgG (H+L), KPL diluted 1:1000. The antibody endpoint titer was calculated as the serum dilution that produced an OD₄₀₅ of 0.5 absorbance units in the ELISA assay using a four parameter curve fitting model in the Softmax software (Molecular Dynamics, Inc., Sunnyvale, Calif.). The result of this analysis are set forth in FIGS. 4-6. PyCSP-specific antibody titers induced by the GC44PyCSP.o, GC45PyCSP.o, and GC46PyCSP.o vectors at the 1×10⁹ pu dose level were significantly greater than the antibody titers induced by the Ad5PyCSP.o vector.

[0183] The results of this example demonstrate that the inventive adenoviral vector encoding a Plasmodium antigen is immunogenic in mice.

### Example 2

[0184] This example demonstrates that prime-boost immunization strategizes utilizing the inventive adenoviral vectors can protect against malaria infection in a mouse model.

[0185] Groups of Balb/c mice (n=14 per group) were injected IM with either 100 μg of a plasmid DNA expressing PyCSP (pExec.PyCSP) or with 1×10⁹ pu of one of the following adenoviral vectors: Ad5PyCSP.o, GC44PyCSP.o, GC45PyCSP.o, GC46PyCSP.o, or an E1/E3/E4-deficient serotype 28 adenoviral vector comprising the PyCSP.o construct (Ad28.PyCSP.o). Animals receiving an E1/E3/E4-deficient serotype 35 adenoviral vector lacking a transgene (“AdNull”) served as a negative control. 42 days following the priming injections, mice were boosted via intramuscular injection with 1×10⁹ pu of one of the aforementioned vectors according to the schedule set forth in Table 1.

TABLE 1

| Priming Vector | Dose | | Boosting Vector | Dose |
|---|---|---|---|---|
| Adnull | 1E+09 | pu | Adnull | 1E+09 pu |
| Ad5PyCSP.o | 1E+09 | pu | Ad5PyCSP.o | 1E+09 pu |
| pExec.PyCSP | 100 | μg | Ad5PyCSP.o | 1E+09 pu |
| Ad28.PyCSP.o | 1E+09 | pu | Ad5PyCSP.o | 1E+09 pu |
| GC44PyCSP.o | 1E+09 | pu | GC44PyCSP.o | 1E+09 pu |
| pExec.PyCSP | 100 | μg | GC44PyCSP.o | 1E+09 pu |
| Ad28.PyCSP.o | 1E+09 | pu | GC44PyCSP.o | 1E+09 pu |
| GC45PyCSP.o | 1E+09 | pu | GC45PyCSP.o | 1E+09 pu |
| pExec.PyCSP | 100 | μg | GC45PyCSP.o | 1E+09 pu |
| Ad28.PyCSP.o | 1E+09 | pu | GC45PyCSP.o | 1E+09 pu |
| GC46PyCSP.o | 1E+09 | pu | GC46PyCSP.o | 1E+09 pu |
| pExec.PyCSP | 100 | μg | GC46PyCSP.o | 1E+09 pu |
| Ad28.PyCSP.o | 1E+09 | pu | GC46PyCSP.o | 1E+09 pu |

[0186] Immunized mice were challenged with 100 live sporozoites/mouse two weeks after the boosting injection (Day 56) by tail vein injection (see, e.g., Limbach et al., Malaria Journal, 10: 65 (2011)). Tail vein bleeds were performed from day 61 to 70 (i.e., 5-14 days after live sporozoites challenge) to examine the clearance of parasite in the blood via parasitemia analysis. Due to evidence of a weak first challenge, mice were re-challenged nine weeks after the boost with 200 live sporozoites/mouse, and parasitemia analysis was performed from day 111 through day 119 (i.e., 5-14 days after second live sporozoites challenge) to confirm sterile protection. The results of the first and second challenge experiments are set forth in Table 2.

TABLE 2

| | First Challenge - 2 weeks post boost | | | | | Second Challenge - 9 weeks post boost | | | | | Single |
|---|---|---|---|---|---|---|---|---|---|---|---|
| | (# protected/#mice) | | | | | (# protected/#mice) | | | | | Challenge |
| Regimen | Ad5 | GC44 | GC45 | GC46 | Controls | Ad5 | GC44 | GC45 | GC46 | Controls | Controls |
| Ad Prime - | 14/14 | 13/14 | 14/14 | 14/14 | | 11/14 | 13/13 | 14/14 | 12/14 | | |
| Ad Boost | | | | | | | | | | | |
| (homologous) | | | | | | | | | | | |
| DNA Prime - | 14/14 | 14/14 | 13/14 | 14/14 | | 12/14 | 13/14 | 7/13 | 12/14 | | |
| Ad Boost | | | | | | | | | | | |
| Ad28 Prime - | 14/14 | 14/14 | 13/14 | 13/14 | | 12/14 | 13/14 | 9/13 | 11/13 | | |
| Ad Boost | | | | | | | | | | | |
| (heterologous) | | | | | | | | | | | |
| Naïve | | | | | 5/14 | | | | | 1/5 | 3/14 |
| Null | | | | | 5/14 | | | | | 0/5 | 3/14 |

[0187] The results of this example demonstrate that gorilla adenoviral vectors protected against malaria infection as well as human serotype 5 adenoviral vectors, and that homologous and heterologous prime-boost regimens provided comparable protection against malaria infection.

[0188] All references, including publications, patent applications, and patents, cited herein are hereby incorporated by reference to the same extent as if each reference were individually and specifically indicated to be incorporated by reference and were set forth in its entirety herein.

[0189] The use of the terms “a” and “an” and “the” and similar referents in the context of describing the invention (especially in the context of the following claims) are to be construed to cover both the singular and the plural, unless otherwise indicated herein or clearly contradicted by context. The terms “comprising,” “having,” “including,” and “containing” are to be construed as open-ended terms (i.e., meaning “including, but not limited to,”) unless otherwise noted. Recitation of ranges of values herein are merely intended to serve as a shorthand method of referring individually to each separate value falling within the range, unless otherwise indicated herein, and each separate value is incorporated into the specification as if it were individually recited herein. All methods described herein can be performed in any suitable order unless otherwise indicated herein or otherwise clearly contradicted by context. The use of any and all examples, or exemplary language (e.g., “such as”) provided herein, is intended merely to better illuminate the invention and does not pose a limitation on the scope of the invention unless otherwise claimed. No language in the specification should be construed as indicating any non-claimed element as essential to the practice of the invention.

[0190] Preferred embodiments of this invention are described herein, including the best mode known to the inventors for carrying out the invention. Variations of those preferred embodiments may become apparent to those of ordinary skill in the art upon reading the foregoing description. The inventors expect skilled artisans to employ such variations as appropriate, and the inventors intend for the invention to be practiced otherwise than as specifically described herein. Accordingly, this invention includes all modifications and equivalents of the subject matter recited in the claims appended hereto as permitted by applicable law. Moreover, any combination of the above-described elements in all possible variations thereof is encompassed by the invention unless otherwise indicated herein or otherwise clearly contradicted by context.

The application's sequence listing, which the Patent Office published only in electronic form, follows.

SEQUENCE LISTING (82 sequences)

SEQ ID NO: 1 - DNA, 30 bp, Gorilla beringei beringei
agctctttggtggcgagcggcgcggcctct

SEQ ID NO: 2 - DNA, 439 bp, Gorilla beringei beringei
aacatcaatacctcaaagtcatggtcagggacactttcgccctcacccacacctccctccgcaaggcggcgcaggcctacgcgctgcccgtggagaagggctgttgcccctaccaggccgtcaaccagttctacatgctaggctcttaccgttcggacacggacgggtttcccctccaagagtactggaaagaccgcgaagagttcgtcctcaaccgcgagctgtggaaaaagaagggggaggataagtatgacatcatccgcgagaccctcgactactgcgcgctcgacgtccaggtcaccgccgagctggtgcacaagctgcgcgagtcctacgcctccttcgtcagggactcggtgggcttgcaagaagcaagcttcaacgtcttccagcggcccaccatctcctccaactcccatgccatcttcaggcagatcgc

SEQ ID NO: 3 - DNA, 34 bp, Gorilla beringei beringei
actgaggctgcggctaaggctgaggtcgaagcca

SEQ ID NO: 4 - DNA, 45 bp, Gorilla beringei beringei
ataggtgtggatgccacacaggcgggagataaccctatatatgct

SEQ ID NO: 5 - DNA, 30 bp, Gorilla beringei beringei
gtagcaggccccctagctgtggccaatggc

SEQ ID NO: 6 - DNA, 399 bp, Gorilla beringei beringei
atgagcgacaccggcaacagctttgatggaagcatctttagcccctatctgacagtgcgcatgcctcactgggctggagtgcgtcagaatgtgatgggttccaacgtggatggacgccccgttctgccttcaaattcgtctacaatggcctacgcgaccgtgggaggaactccgctggacgccgcgacctccgccgccgcctccgccgccgccgcgaccgcgcgcagcatggctacggacctttacagctctttggtggcgagcggcgcggcctctcgcgcgtctgctcgggatgagaaactgaccgctctgctgcttaaactggaagacttgacccgggagctgggtcaactgacccagcaggtctccagcttgcgtgagagcagccttgcctccccc

SEQ ID NO: 7 - DNA, 3168 bp, Gorilla beringei beringei
atggacagctccaatgtgcgcgatgtcgtcatcaaactccgcccgccgagcgccgagatctggacctgcggctctcgcggcgtggtggtctgctccaccatcgccctccaggagacagatgctggcggccagacaaccaaagtagaagaccaccagccacacgggaccccaggcgggggacttagattcccgctgcgcttcctcgtcagaggtcgccaggttcacctcgtgcaagatatacaacccgtgcagcgctgccagtactgcggtcgcttttacaaaagccagcacgagtgctcggcccgcagacgggacttctactttcaccacatcaacagccaatcctccaactggtggcgggagatccagttcttcccgatcggctctcatcctcgcacggagcgcctctttgtcacctacgatgtagagacctacacttggatgggagcctttggcaagcagctcgtgcccttcatgctggtcatgaaactggggggcgacgaggctctggtcgccgccgcgcgcgacctcgcccgagagctcagatgggacccctgggagaaagaccccctcaccttctactgcatcacccccgaaaagatggccgtggggcgacagttcagaaccttccgcgaccgcctgcagaccctcatggcccgcgacctctggcgatccttcctggcggccaaccctcacttgcaagactgggccctggaggagcacggcctggaatcgcccgaggagctcacctacgaggaactcaaaaagctcccctccatcaagggccagccccgctttttggagctctacatcgtgggccacaacataaacggctttgacgagatcgtcctggccgcccaggtcatcaacaaccgctcctcggtcccagggccctttcgcatcaccagaaacttcatgcctcgagcggggaagatcctcttcaatgacctcaccttctccctgcccaacccgcgctccaaaaagcgcacggactacaccctgtgggaacagggcggctgcgatgacacagacttcaaacatcaatacctcaaagtcatggtcagggacactttcgccctcacccacacctccctccgcaaggcggcgcaggcctacgcgctgcccgtggagaagggctgttgcccctaccaggccgtcaaccagttctacatgctaggctcttaccgttcggacacggacgggtttcccctccaagagtactggaaagaccgcgaagagttcgtcctcaaccgcgagctgtggaaaaagaagggggaggataagtatgacatcatccgcgagaccctcgactactgcgcgctcgacgtccaggtcaccgccgagctggtgcacaagctgcgcgagtcctacgcctccttcgtcagggactcggtgggcttgcaagaagcaagcttcaacgtcttccagcggcccaccatctcctccaactcccatgccatcttcaggcagatcgccttccgcgccgagcgcccccagcgcaccaacctcgggcccaacatgctggccccctcccacgagctctatgactacgtgcgcgccagcatccgcggggggcgctgctaccccacctacctcggcatcctcagggaacccctgtacgtgtatgacatctgcggcatgtacgcctccgcgctcacccaccccatgccctggggcccgcccctcaacccctacgagcgcgcgctcgccgcccgcgaatggcagcgggctctggacatgcaagcttgcaagatcgactactttgacccgcgcttgctccccggggtcttcaccatcgacgcggaccccccaaacgaggaccagctggaccccctaccccccttctgctcgcgcaagggcggccgcctctgctggaccaacgagcgcctgcgcggcgaggtcgccaccagcgtcgacatggtcaccctgcacaaccgaggctggagggtgcgcctaatcccagacgagcgcaccaccgtcttccccgagtggaagtgcgtggcccgcgagtacgtgcaactcaacatcgcggccaaggagcgagccgaccgcgacaaaaaccagaccctgcgctccatcgccaagctgctctccaacgccctctacgggtcgttcgccaccaagcttgacaacaaaaaaatagtgttttctgaccagatggacccaggtaccctcaaaggtatcacctccggacaggtgaacatcaaatcctcctcatttttagaaactgacaacctgagcgctgaggtcatgcccgccttcgagagggaatacttaccccagcagctggccctcgcagacagcgatgcggaagagagtgaagatgaaagggcgcccacccccttttatacccccccgtcgggaacccccggtcacgtgtcctacacctacaagccaatcacttttctggacgcggaggagggggacatgtgcctgcacaccctggagaaggtggacccgctagtggacaacgaccgctacccctcccacgtggcctccttcgtcctggcctggacgcgggccttcgtctcagagtggtcagagtttctctacgaggaggacagaggcactccgctggaagacaggcccctgaagtcggtctacggggacacggacagcctcttcgtcaccgagaagggacaccgcctcatggagagccgaggtaagaaacgcatcaaaaagcatgggggcaacctggtttttgaccctgaccgcccggagctcacttggctggtggaatgcgagacggtctgcgcttcctgcggcgcggacgcctactccccagagtccgtgtttctcgctcccaagctctacgccctgaagagcctgcagtgcccctcgtgcggcgccacctccaagggaaagctccgcgccaaggggcacgccgccgagggtctcgactacgagaccatggtcaaatgctacctggccgacgcgcagggcgaagagcggcagcgattcagcaccagcagaaccagcctcaagcgcaccctggccagcgcccaacccggagcgcaccccttcaccgtgacccagaccaccctgacgaggaccctgcgcccatggaaggacatgactctggccccgctggacgcccatcggctggtgccctacagcgaaagccgccccaacccgcgaaacgaggagatctgctggatcgagatgccg

SEQ ID NO: 8 - DNA, 1974 bp, Gorilla beringei beringei
atgcggcgcgcggcgatgttcgaggaggggcctcccccctcttacgagagcgcgatggggatttctcctgcggcgcccctgcagcctccctacgtgcctcctcggtacctgcaacctacaggggggagaaatagcatctgttactctgagctgcagcccctgtacgataccaccagactgtacctggtggacaacaagtccgcggacgtggcctccctgaactaccagaacgaccacagcgattttttgaccacggtgatccaaaacaacgacttcaccccaaccgaggccagcacccagaccataaacctggataacaggtcgaactggggcggcgacctgaagaccatcttgcacaccaacatgcccaacgtgaacgagttcatgttcaccaactcttttaaggcgcgggtgatggtggcgcgcgagcagggggaggcgaagtacgagtgggtggacttcacgctgcccgagggcaactactcagagaccatgactctcgacctgatgaacaatgcgatcgtggaacactatctgaaagtgggcaggcagaacggggtgaaggaaagcgatatcggggtcaagtttgacaccagaaacttccgtctgggctgggaccccgtgaccgggctggtcatgccgggggtctacaccaacgaggcctttcatcccgacatagtgcttctgcccggctgtggggtggacttcacccagagccggctgagcaacctgctgggcattcgcaagcggcagcctttccaggagggtttcaagatcacctatgaggatctgaaggggggcaacattcccgcgctccttgatctggacgcctacgaggagagcttgaaacccgaggagagcgctggcgacagcggcgagagtggcgaggagcaagccggcggcggtggcggcgcgtcggtagaaaacgaaagtacgcccgcagtggcggcggacgctgcggaggtcgagccggaggccatgcagcaggacgcagaggagggcgcacaggagggcgcgcagaaggacatgaacgatggggagatcaggggagacacattcgccacccggggcgaagaaaaagaggcagaggcggcggcggcggcgacggcggaggccgaaaccgaggttgaggcagaggcagagcccgagaccgaagttatggaagacatgaatgatggagaacgtaggggcgacacgttcgccacccggggcgaagagaaggcggcggaggcagaagccgcggctgaggaggcggctgcggctgcggccaagactgaggctgcggctaaggctgaggtcgaagccaatgttgcggttgaggctcaggctgaggaggaggcggcggctgaagcagttaaggaaaaggcccaggcagagcaggaagagaaaaaacctgtcattcaacctctaaaagaagatagcaaaaagcgcagttacaacgtcatcgagggcagcacctttacccagtaccgcagctggtacctggcgtacaactacggcgacccggtcaagggggtgcgctcgtggaccctgctctgcacgccggacgtcacctgcggctccgagcagatgtactggtcgctgccgaacatgatgcaagacccggtgaccttccgctccacgcggcaggttagcaacttcccggtggtgggcgccgaactgctgcccgtgcactccaagagtttttacaacgagcaggccgtctactcccagctgatccgccaggccacctctctgacccacgtgttcaatcgctttcccgagaaccagattttggcgcgcccgccggcccccaccatcaccaccgtgagtgaaaacgttcctgccctcacagatcacgggacgctaccgctgcgcaacagcatctcaggagtccagcgagtgaccattactgacgccagacgccggacctgcccctacgtttacaaggccttgggcatagtctcgccgcgcgtcctctccagtcgcactttt

SEQ ID NO: 9 - DNA, 2877 bp, Gorilla beringei beringei
atggcgaccccatcgatgatgcctcagtggtcgtacatgcacatctcgggccaggacgcttcggagtacctgagccccgggctggtgcagttcgcccgcgccacagacacctacttcaacatgagtaacaagttcaggaaccccactgtggcgcccacccacgatgtgaccacggaccggtcgcagcgcctgacgctgcggttcatccccgtggatcgggaggacaccgcctactcttacaaggcgcggttcacgctggccgtgggcgacaaccgcgtgctggacatggcctccacttactttgacatcaggggggtgctggacaggggccccaccttcaagccctactcgggtactgcctacaactccctggcccccaagggcgctcccaattcttgcgagtgggaacaagatgaaccagctcaggcagcaatagctgaagatgaagaagaacttgaagaagaacaagctcaggacgaacaggcgcccactaagaaaacccatgtatacgcccaggcacctctttctggtgaaaaaattactaaggatggtttgcaaataggtgtggatgccacacaggcgggagataaccctatatatgctgataaaacattccaacccgaacctcagataggtgagtctcagtggaacgaggctgatgccacagtagcaggaggcagagtcttaaaaaagaccacccctatgagaccttgctatggatcctatgccaaacctactaatgccaatggcggtcaagggatcatggtggccaatgatcagggagcgcttgaatctaaagttgagatgcaatttttctccaccacaacgtctcttaatgtaagggaaggtgaaaacaatcttcagccaaaagtagtgctatacagcgaagatgttaacttggaatcccctgacactcatttgtcttacaaacctaaaaaggatgacaccaactctaaaatcatgttgggtcagcaagccatgcccaacagacccaacctcattgcttttagggacaactttattggacttatgtactacaacagcacaggcaacatgggagtgctggcaggacaggcctcccagctaaacgctgtggtagacttgcaagacagaaacacagagctgtcataccaactgatgcttgattccattggagacagatcaagatacttttccatgtggaaccaggcagtggacagctatgacccagatgtcagaatcattgaaaaccatggggttgaagatgagctgcccaactattgctttcccctgggcggtattggaattacagacacataccagtgcataaaaccaaccgcagctgctaataacactacatggtctaaggatgaagaatttagtgatcgcaatgaaataggggtgggaaacaacttcgccatggagatcaacatccaggccaacctctggaggaacttcctctatgcgaacgtggggctctacctgccagacaagctcaagtacaaccccaccaacgtggacatctctgacaaccccaacacctatgactacatgaacaagcgtgtggtggctcccggcctggtggactgctttgtcaatgtgggagccaggtggtccctggactacatggacaacgtcaaccccttcaaccaccaccgcaatgcgggtctgcgctaccgctccatgatcctgggcaacgggcgctacgtgcccttccacattcaggtgccccagaagttctttgccatcaagaacctcctcctcctgccgggctcctacacttacgagtggaacttcaggaaggatgtcaacatggtcctgcagagctctctgggcaatgaccttagggtggacggggccagcatcaagtttgacagcgtcaccctctatgctaccttcttccccatggctcacaacaccgcctccacgctcgaggccatgctgaggaacgacaccaacgaccagtccttcaatgactacctctctggggccaacatgctctaccccatccccgccaaggccaccaacgtgcccatctccattccctctcgcaactgggccgccttcagaggctgggcctttacccgccttaagaccaaggaaaccccctccctgggctcgggttttgacccctactttgtctactcgggatccatcccctacctggatggcaccttctacctcaaccacacttttaagaagatatccatcatgtatgactcctccgtcagctggccgggcaatgaccgcctgctcacccccaatgagttcgaggtcaagcgcgccgtggacggcgagggctacaacgtggcccagtgcaacatgaccaaggactggttcctggtgcagatgctggccaactacaacataggctaccagggcttctacatcccagagagctacaaggacaggatgtactccttcttcagaaatttccaacccatgagcaggcaggtggtggacgagaccaaatacaaggactatcaggccattggcatcactcaccagcacaacaactcgggattcgtgggctacctggctcccaccatgcgcgaggggcaggcctaccccgccaacttcccctacccgttgataggcaaaaccgcggtcgacagcgtcacccagaaaaagttcctctgcgaccgcaccctctggcgcatccccttctctagcaacttcatgtccatgggtgcgctcacggacctgggccagaacctgctctatgccaactccgcccatgcgctggacatgacttttgaggtggaccccatggacgagcccacccttctctatattgtgtttgaagtgttcgacgtggtcagagtgcaccagccgcaccgcggtgtcatcgagaccgtgtacctgcgcacgcccttctcggccggcaacgccaccacc

SEQ ID NO: 10 - DNA, 1749 bp, Gorilla beringei beringei
atgaaacgcgcgagatcgtctgacgagaccttcaaccccgtgtacccctacgataccgagatcgctccgacttctgtccctttccttacccctccctttgtgtcatccgcaggaatgcaagaaaatccagctggggtgctgtccctgcacttgtcagagccccttaccacccacaatggggccctgactctaaaaatggggggcggcctgaccctggacaaggaagggaatctcacttcccaaaacatcaccagtgtcgatccccctctcaaaaaaagcaagaacaacatcagccttcagaccgccgcacccctcgccgtcagctccggggccctaacactttttgccactccccccctagcggtcagtggtgacaaccttactgtgcagtctcaggcccctctcactttggaagactcaaaactaactctggccaccaaaggacccctaactgtgtccgaaggcaaacttgtcctagaaacagaggctcccctgcatgcaagtgacagcagcagcctgggccttagcgttacggccccacttagcattaacaatgacagcctaggactagatctgcaggcacccattgtctctcaaaatggaaaactggctctaaatgtagcaggccccctagctgtggccaatggcattaatgctttgacagtaggcacaggcaaaggtattggtctaaatgaaaccagcactcacttgcaagcaaagttggtcgcccccctaggctttgataccaatggcaacattaagctaagcgttgcaggaggcatgagactaaataatgacacacttatactagatgtaaactacccatttgaagctcaaggccaactaagtctaagagtgggccagggtccgctgtatgtagattctagcagccataacctgaccattagatgccttagaggattatacataacatcgtctaataaccaaaccggtctagaggccaacataaaactaacaaaaggccttgtctatgatggaaatgccatagcagtcaatgttggtcaaggattgcaatacagcactactgccacatcggaaggtgtgtatcctatacagtctaagataggtttgggaatggaatatgataccaacggagccatgatgacaaaactaggctctggactaagctttgacaattcaggagccattgtagtgggaaacaaaaatgatgacaggcttactctgtggactacaccagacccatctcctaactgtagaatttattctgaaaaagatactaaactaaccttggtgctgactaagtgtggcagccaaatcctaggcacagtatctgcccttgctgtcagaggcagccttgcgcccatcactaatgcatccagcatagtccaaatatttctaagatttgatgaaaatggactattgatgagcaactcatcgctagacggtgattactggaattacagaaatggggactccactaatagcacaccatatacaaatgcagtaggctttatgcctaatctagcagcctatcctaaaggtcaggctacagctgcaaaaagcagtattgtaagccaggtatacatggatggtgacactactaaacctataacactaaaaataaacttcaatggcattgatgaaacaacagaaaatacccctgttagtaaatattccatgacattctcatggagctggcccaccgcaagctacataggccacacttttgcaacaaactcttttactttctcctacatcgcccaagaa

SEQ ID NO: 11 - protein, 10 aa, Gorilla beringei beringei
SSLVASGAAS

SEQ ID NO: 12 - protein, 147 aa, Gorilla beringei beringei
KHQYLKVMVRDTFALTHTSLRKAAQAYALPVEKGCCPYQAVNQFYMLGSYRSDTDGFPLQEYWKDREEFVLNRELWKKKGEDKYDIIRETLDYCALDVQVTAELVHKLRESYASFVRDSVGLQEASFNVFQRPTISSNSHAIFRQIA

SEQ ID NO: 13 - protein, 15 aa, Gorilla beringei beringei
KTEAAAKAEVEANVA

SEQ ID NO: 14 - protein, 15 aa, Gorilla beringei beringei
IGVDATQAGDNPIYA

SEQ ID NO: 15 - protein, 15 aa, Gorilla beringei beringei
LNVAGPLAVANGINA

SEQ ID NO: 16 - protein, 133 aa, Gorilla beringei beringei
MSDTGNSFDGSIFSPYLTVRMPHWAGVRQNVMGSNVDGRPVLPSNSSTMAYATVGGTPLDAATSAAASAAAATARSMATDLYSSLVASGAASRASARDEKLTALLLKLEDLTRELGQLTQQVSSLRESSLASP

SEQ ID NO: 17 - protein, 1056 aa, Gorilla beringei beringei
MDSSNVRDVVIKLRPPSAEIWTCGSRGVVVCSTIALQETDAGGQTTKVEDHQPHGTPGGGLRFPLRFLVRGRQVHLVQDIQPVQRCQYCGRFYKSQHECSARRRDFYFHHINSQSSNWWREIQFFPIGSHPRTERLFVTYDVETYTWMGAFGKQLVPFMLVMKLGGDEALVAAARDLARELRWDPWEKDPLTFYCITPEKMAVGRQFRTFRDRLQTLMARDLWRSFLAANPHLQDWALEEHGLESPEELTYEELKKLPSIKGQPRFLELYIVGHNINGFDEIVLAAQVINNRSSVPGPFRITRNFMPRAGKILFNDLTFSLPNPRSKKRTDYTLWEQGGCDDTDFKHQYLKVMVRDTFALTHTSLRKAAQAYALPVEKGCCPYQAVNQFYMLGSYRSDTDGFPLQEYWKDREEFVLNRELWKKKGEDKYDIIRETLDYCALDVQVTAELVHKLRESYASFVRDSVGLQEASFNVFQRPTISSNSHAIFRQIAFRAERPQRTNLGPNMLAPSHELYDYVRASIRGGRCYPTYLGILREPLYVYDICGMYASALTHPMPWGPPLNPYERALAAREWQRALDMQACKIDYFDPRLLPGVFTIDADPPNEDQLDPLPPFCSRKGGRLCWTNERLRGEVATSVDMVTLHNRGWRVRLIPDERTTVFPEWKCVAREYVQLNIAAKERADRDKNQTLRSIAKLLSNALYGSFATKLDNKKIVFSDQMDPGTLKGITSGQVNIKSSSFLETDNLSAEVMPAFEREYLPQQLALADSDAEESEDERAPTPFYTPPSGTPGHVSYTYKPITFLDAEEGDMCLHTLEKVDPLVDNDRYPSHVASFVLAWTRAFVSEWSEFLYEEDRGTPLEDRPLKSVYGDTDSLFVTEKGHRLMESRGKKRIKKHGGNLVFDPDRPELTWLVECETVCASCGADAYSPESVFLAPKLYALKSLQCPSCGATSKGKLRAKGHAAEGLDYETMVKCYLADAQGEERQRFSTSRTSLKRTLASAQPGAHPFTVTQTTLTRTLRPWKDMTLAPLDAHRLVPYSESRPNPRNEEICWIEMP

SEQ ID NO: 18 - protein, 658 aa, Gorilla beringei beringei
MRRAAMFEEGPPPSYESAMGISPAAPLQPPYVPPRYLQPTGGRNSICYSELQPLYDTTRLYLVDNKSADVASLNYQNDHSDFLTTVIQNNDFTPTEASTQTINLDNRSNWGGDLKTILHTNMPNVNEFMFTNSFKARVMVAREQGEAKYEWVDFTLPEGNYSETMTLDLMNNAIVEHYLKVGRQNGVKESDIGVKFDTRNFRLGWDPVTGLVMPGVYTNEAFHPDIVLLPGCGVDFTQSRLSNLLGIRKRQPFQEGFKITYEDLKGGNIPALLDLDAYEESLKPEESAGDSGESGEEQAGGGGGASVENESTPAVAADAAEVEPEAMQQDAEEGAQEGAQKDMNDGEIRGDTFATRGEEKEAEAAAAATAEAETEVEAEAEPETEVMEDMNDGERRGDTFATRGEEKAAEAEAAAEEAAAAAAKTEAAAKAEVEANVAVEAQAEEEAAAEAVKEKAQAEQEEKKPVIQPLKEDSKKRSYNVIEGSTFTQYRSWYLAYNYGDPVKGVRSWTLLCTPDVTCGSEQMYWSLPNMMQDPVTFRSTRQVSNFPVVGAELLPVHSKSFYNEQAVYSQLIRQATSLTHVFNRFPENQILARPPAPTITTVSENVPALTDHGTLPLRNSISGVQRVTITDARRRTCPYVYKALGIVSPRVLSSRTF

SEQ ID NO: 19 - protein, 959 aa, Gorilla beringei beringei
MATPSMMPQWSYMHISGQDASEYLSPGLVQFARATDTYFNMSNKFRNPTVAPTHDVTTDRSQRLTLRFIPVDREDTAYSYKARFTLAVGDNRVLDMASTYFDIRGVLDRGPTFKPYSGTAYNSLAPKGAPNSCEWEQDEPAQAAIAEDEEELEEEQAQDEQAPTKKTHVYAQAPLSGEKITKDGLQIGVDATQAGDNPIYADKTFQPEPQIGESQWNEADATVAGGRVLKKTTPMRPCYGSYAKPTNANGGQGIMVANDQGALESKVEMQFFSTTTSLNVREGENNLQPKVVLYSEDVNLESPDTHLSYKPKKDDTNSKIMLGQQAMPNRPNLIAFRDNFIGLMYYNSTGNMGVLAGQASQLNAVVDLQDRNTELSYQLMLDSIGDRSRYFSMWNQAVDSYDPDVRIIENHGVEDELPNYCFPLGGIGITDTYQCIKPTAAANNTTWSKDEEFSDRNEIGVGNNFAMEINIQANLWRNFLYANVGLYLPDKLKYNPTNVDISDNPNTYDYMNKRVVAPGLVDCFVNVGARWSLDYMDNVNPFNHHRNAGLRYRSMILGNGRYVPFHIQVPQKFFAIKNLLLLPGSYTYEWNFRKDVNMVLQSSLGNDLRVDGASIKFDSVTLYATFFPMAHNTASTLEAMLRNDTNDQSFNDYLSGANMLYPIPAKATNVPISIPSRNWAAFRGWAFTRLKTKETPSLGSGFDPYFVYSGSIPYLDGTFYLNHTFKKISIMYDSSVSWPGNDRLLTPNEFEVKRAVDGEGYNVAQCNMTKDWFLVQMLANYNIGYQGFYIPESYKDRMYSFFRNFQPMSRQVVDETKYKDYQAIGITHQHNNSGFVGYLAPTMREGQAYPANFPYPLIGKTAVDSVTQKKFLCDRTLWRIPFSSNFMSMGALTDLGQNLLYANSAHALDMTFEVDPMDEPTLLYIVFEVFDVVRVHQPHRGVIETVYLRTPFSAGNATT

SEQ ID NO: 20 - protein, 583 aa, Gorilla beringei beringei
MKRARSSDETFNPVYPYDTEIAPTSVPFLTPPFVSSAGMQENPAGVLSLHLSEPLTTHNGALTLKMGGGLTLDKEGNLTSQNITSVDPPLKKSKNNISLQTAAPLAVSSGALTLFATPPLAVSGDNLTVQSQAPLTLEDSKLTLATKGPLTVSEGKLVLETEAPLHASDSSSLGLSVTAPLSINNDSLGLDLQAPIVSQNGKLALNVAGPLAVANGINALTVGTGKGIGLNETSTHLQAKLVAPLGFDTNGNIKLSVAGGMRLNNDTLILDVNYPFEAQGQLSLRVGQGPLYVDSSSHNLTIRCLRGLYITSSNNQTGLEANIKLTKGLVYDGNAIAVNVGQGLQYSTTATSEGVYPIQSKIGLGMEYDTNGAMMTKLGSGLSFDNSGAIVVGNKNDDRLTLWTTPDPSPNCRIYSEKDTKLTLVLTKCGSQILGTVSALAVRGSLAPITNASSIVQIFLRFDENGLLMSNSSLDGDYWNYRNGDSTNSTPYTNAVGFMPNLAAYPKGQATAAKSSIVSQVYMDGDTTKPITLKINFNGIDETTENTPVSKYSMTFSWSWPTASYIGHTFATNSFTFSYIAQE

SEQ ID NO: 21 - DNA, 37229 bp, Gorilla beringei beringei
catcatcaataatataccttattttggattgtggccaatatgataatgaggtgggcggggagaggcggggcgggtgacgtaggacgcgcgagtagggttgggaggtgtggcggaagtgtggcatttgcaagtgggaggagctcacatgcaagcttccgtcgcggaaaatgtgacgtttttgatgagcgccgcctacctccggaagtgccaattttcgcgcgcttttcaccggatatcgtagtaattttgggcgggaccatgtaagatttggccattttcgcgcgaaaagtgaaacggggaagtgaaaactgaataatagggcgttagtcatagcgcgtaatatttaccgagggccgagggactttgaccgattacgtggaggactcgcccaggtgttttttacgtgaatttccgcgttccgggtcaaagtctccgtttttattgtcaccgtcatttgacgcggagggtatttaaacccgctgcgctcctcaagaggccactcttgagtgccagcgagaagagttttctcctctgctccgcttcggtgatcgaaaaatgagacacatagcctgcactccgggtcttttgtccggtcgggcggcggccgagcttttggacgctttgatcaatgatgtcctaagcgatgattttccgtctactacccactttagcccacctactcttcacgaactgtacgatctggatgtactggtggatgtgaacgatcccaacgaggaggcggtttctgcgttttttcccgagtctgcgctgttggccgctcaggagggatttgacctacacactccgccgcctattttagagtctccgctgccggagcccagtggtataccttatatgcctgaactgcttcccgaagtggtagacctgacctgccacgagcctggctttccgcccagcgacgatgagggtgagccttttgttttagactttgctgagatacctgggcacggttgcaggtcttgtgcatatcatcagagggttaccggagaccccgaggttaagtgttcgctgtgctatatgaggatgacctcttcctttatctacagtaagtttttgtctaggtgggcttttgggtaggtgggttttgtgtcagaacaggtgtaaacgttgcttgtgttttttgtacctgtaggtccggtgtccgagccagacccggagcccgaccgcgatcccgagccggatcccgagcctcctcgcaggacaaggaaactaccttccattctgtgcaagtctcagacacctgtaaggaccagcgaggcagacagcaccgactctggcacttctacctctccccctgaaattcacccagtggttcctctgggtatacataaacctgttgctgttaaagtttgcgggcgacgccctgcagtacagtgcattgaggacttgcttcacgatcccgaggaacctttggacttgagccttaaacgccctaggcaataaaccccacctaagtaataaaccccacctaagtaataaaccctgccgcccttggttattgagatgacgcccaatgtttgcttttgaatgacttcatgtgtgtaataaaagtgagtgtgatcataggtctcttgtttgtctgggcggggcttaagggtatataagtctcttggggctaaacttggttacacttgaccccaatggaggcgtgggggtgcttggaggagtttgcggacgtgcgccgtttgctggacgagagctctagcaatacctatactatttggaggtatctgtggggctctactcaggccaagttggtttccagaattaagcaggattacaagtgcgattttgaagagctttttagttcctgcggtgagcttttgcaatccttgaatctgggccatcaggctattttccaggaaaaggttctctcgactttggatttttccactcccgggcgcaccgccgcttgtgtggcttttgtgtcttttgtgcaagataaatggagcgaggagacccacctgagtcacggctacgtactggatttcatggcgatggctctttggagggctcacaacaaatggaagattcagaaggaactgtacggttccgccctacgtcgtccacttctgtcgcgacaggggctgaggtttcccgaccatcggcagcatcagaatctggaagacgagtcggaggagcgagcggaggagaagatcagcttgagagccggcctggaccctcctcaggaggaatgaatctcccgcaggtggttgacctgtttccagaactgagacgggtcctgactatcagggaggatggtcagtttgtgaagaagtttaagagggatcggggtgagggagatgatgaggcggctagcaatttagcttttagtctgatgactcgccaccgaccggaatgtattacctatcagcagattaaggagagttgtgccaacgagctggatcttttgggtcagaagtatagcatagaacagcttaccacttactggcttcagcctggggatgattgggaagaggcgatcagggtgtatgcaaaggtggccctgcggcccgattgcaagtataagattactaagttggttaatattagaaactgctgctatatttctgggaacggggccgaagtggagatagatactcaggacagggtggcttttaggtgttgcatgataaacatgtggcccgggatactggggatggatggggtggtattcatgaatgtgaggtttacgggccccaactttaatggcacggtgttcatgggcaacaccaacttgctcctgcatggtgcgagtttctatgggtttaataacacctgtatagaggcctggaccgatgtaaaggttcgaggttgttccttttatagctgttggaaggcggtggtgtgtcgccctaaaagcaggggttctgtgaaaaaatgcttgtttgaaaggtgcaccttaggcatcctctctgagggcaactccagggtgcgccataatgtggcttcgaactgcggttgcttcatgcaagtgaagggggtgagcgttatcaagcataactcggtgtgtggaaactgcgaggatcgcgcctcccagatgctgacctgctttgatggcaactgtcacctgttgaagaccattcatataagcagccaccccagaaaggcctggcccgtgtttgagcataacatcttgacccgctgctccttgcatctgggggtcaggaggggtatgttcctgccttaccagtgtaactttagccacactaaaatcctgctggaacccgagtgcatgaccaaggtcagcctgaatggtgtgtttgatgtgactctgaaaatctggaaggtgctgaggtatgatgagaccaggaccaggtgccgaccctgcgagtgcggcggcaagcacatgagaaatcagcctgtgatgttggatgtgaccgaggagcttaggcctgaccatctggtgctggcctgcaccagggccgagtttgggtctagcgatgaggataccgattgaggtgggtaaggtgggcgtggctagaagggtggggcgtgtataaattgggggtctaagggtctctctgttttgtcttgcaacagccgccgccatgagcgacaccggcaacagctttgatggaagcatctttagcccctatctgacagtgcgcatgcctcactgggctggagtgcgtcagaatgtgatgggttccaacgtggatggacgccccgttctgccttcaaattcgtctacaatggcctacgcgaccgtgggaggaactccgctggacgccgcgacctccgccgccgcctccgccgccgccgcgaccgcgcgcagcatggctacggacctttacagctctttggtggcgagcggcgcggcctctcgcgcgtctgctcgggatgagaaactgaccgctctgctgcttaaactggaagacttgacccgggagctgggtcaactgacccagcaggtctccagcttgcgtgagagcagccttgcctccccctaatggcccataatataaataaaagccagtctgtttggattaagcaagtgtatgttctttatttaactctccgcgcgcggtaagcccgggaccagcggtctcggtcgtttagggtgcggtggattctttccaacacgtggtacaggtggctctggatgtttagatacatgggcatgagtccatccctggggtggaggtagcaccactgcagagcttcgtgctcgggggtggtgttgtatatgatccagtcgtagcaggagcgctgggcgtggtgctgaaaaatgtccttaagcaagaggcttatagctagggggaggcccttggtgtaagtgtttacaaatctgctcagttgggaggggtgcatccggggggatataatgtgcatcttggactggatttttaggttggctatgttcccacccagatcccttctgggattcatgttgtgcaggaccaccagcacggtatatccagtgcacttgggaaatttatcgtggagcttagacgggaatgcatggaagaacttggagacgcccttgtggcctcccagattttccatacattcgtccatgatgatggcaatgggcccgtgggaagctgcctgagcaaaaatgtttctgggatcgctcacatcgtagttatgttccagggtgaggtcatcataggacatctttacgaatcgggggcggagggtcccggactgggggatgatggtaccctcgggccccggggcgtagttcccctcacagatctgcatctcccaggctttcatttcagagggagggatcatatccacctgcggagcgatgaaaaacacagtttctggcgcaggggagattaactgggatgagagcaggtttctgagcagctgtgactttccacagccggtgggcccatatatcacgcctatcaccggctgcagctggtagttaagagagctgcagctgccgtcctcccggagcaggggggccacctcgttcagcatatccctgacgtggatgttctccctgaccaattccgccagaaggcgctcgccgcccagcgaaagcagctcttgcaaggaagcaaaatttttcagcggttttaggccgtcggccgtgggcatgtttttcagcgtctgggtcagcagttccagcctgtcccacagctcggtgatgtgctctacggcatctcgatccagcagatctcctcgtttcgcgggttggggcggctttcgctgtagggcaccagccgatgggcgtccagcggggccagagtcatgtccttccatgggcgcagggtcctcgtcagggtggtctgggtcacggtgaaggggtgcgctccgggttgggcgctggccagggtgcgcttgaggctggttctgctggtgctgaatcgctgccgctcttcgccctgcgcgtcggccaggtagcatttgaccatggtctcgtagtcgagaccctcggcggcgtgccccttggcgcggagctttcccttggaggtggcgccgcacgaggggcactgcaggctcttcagggcgtagagcttgggagcgagaaacacggactctggggagtaggcgtccgcgccgcaggaagcgcagaccgtctcgcattccaccagccaagtgagctccgggcggtcagggtcaaaaaccaggttgcccccatgctttttgatgcgtttcttacctcggctctccatgaggcggtgtcccttctcggtgacgaagaggctgtccgtgtccccgtagaccgacttcaggggcctgtcttccagcggagtgcctctgtcctcctcgtagagaaactctgaccactctgagacgaaggcccgcgtccaggccaggacgaaggaggccacgtgggaggggtagcggtcgttgtccactagcgggtccaccttctccagggtgtgcaggcacatgtccccctcctccgcgtccagaaaagtgattggcttgtaggtgtaggacacgtgaccgggggttcccgacgggggggtataaaagggggtgggcgccctttcatcttcactctcttccgcatcgctgtctgcgagggccagctgctggggtaagtattccctctcgaaggcgggcatgacctcagcgctcaggttgtcagtttctaaaaatgaggaggatttgatgttcacctgtccggaggtgatacctttgagggtacctgggtccatctggtcagaaaacactatttttttgttgtcaagcttggtggcgaacgacccgtagagggcgttggagagcagcttggcgatggagcgcagggtctggtttttgtcgcggtcggctcgctccttggccgcgatgttgagttgcacgtactcgcgggccacgcacttccactcggggaagacggtggtgcgctcgtctgggattaggcgcaccctccagcctcggttgtgcagggtgaccatgtcgacgctggtggcgacctcgccgcgcaggcgctcgttggtccagcagaggcggccgcccttgcgcgagcagaaggggggtagggggtccagctggtcctcgtttggggggtccgcgtcgatggtgaagaccccggggagcaagcgcgggtcaaagtagtcgatcttgcaagcttgcatgtccagagcccgctgccattcgcgggcggcgagcgcgcgctcgtaggggttgaggggcgggccccagggcatggggtgggtgagcgcggaggcgtacatgccgcagatgtcatacacgtacaggggttccctgaggatgccgaggtaggtggggtagcagcgccccccgcggatgctggcgcgcacgtagtcatagagctcgtgggagggggccagcatgttgggcccgaggttggtgcgctgggggcgctcggcgcggaaggcgatctgcctgaagatggcatgggagttggaggagatggtgggccgctggaagacgttgaagcttgcttcttgcaagcccaccgagtccctgacgaaggaggcgtaggactcgcgcagcttgtgcaccagctcggcggtgacctggacgtcgagcgcgcagtagtcgagggtctcgcggatgatgtcatacttatcctcccccttctttttccacagctcgcggttgaggacgaactcttcgcggtctttccagtactcttggaggggaaacccgtccgtgtccgaacggtaagagcctagcatgtagaactggttgacggcctggtaggggcaacagcccttctccacgggcagcgcgtaggcctgcgccgccttgcggagggaggtgtgggtgagggcgaaagtgtccctgaccatgactttgaggtattgatgtttgaagtctgtgtcatcgcagccgccctgttcccacagggtgtagtccgtgcgctttttggagcgcgggttgggcagggagaaggtgaggtcattgaagaggatcttccccgctcgaggcatgaagtttctggtgatgcgaaagggccctgggaccgaggagcggttgttgatgacctgggcggccaggacgatctcgtcaaagccgtttatgttgtggcccacgatgtagagctccaaaaagcggggctggcccttgatggaggggagctttttgagttcctcgtaggtgagctcctcgggcgattccaggccgtgctcctccagggcccagtcttgcaagtgagggttggccgccaggaaggatcgccagaggtcgcgggccatgagggtctgcaggcggtcgcggaaggttctgaactgtcgccccacggccatcttttcgggggtgatgcagtagaaggtgagggggtctttctcccaggggtcccatctgagctctcgggcgaggtcgcgcgcggcggcgaccagagcctcgtcgccccccagtttcatgaccagcatgaagggcacgagctgcttgccaaaggctcccatccaagtgtaggtctctacatcgtaggtgacaaagaggcgctccgtgcgaggatgagagccgatcgggaagaactggatctcccgccaccagttggaggattggctgttgatgtggtgaaagtagaagtcccgtctgcgggccgagcactcgtgctggcttttgtaaaagcgaccgcagtactggcagcgctgcacgggttgtatatcttgcacgaggtgaacctggcgacctctgacgaggaagcgcagcgggaatctaagtcccccgcctggggtcccgtgtggctggtggtcttctactttggttgtctggccgccagcatctgtctcctggagggcgatggtggagcagaccaccacgccgcgagagccgcaggtccagatctcggcgctcggcgggcggagtttgatgacgacatcgcgcacattggagctgtccatggtctccagctcccgcggcggcaggtcagctgggagttcctggaggttcacctcgcagagacgggtcaaggcgcgggcagtgttgagatggtatctgatttcaaggggcgtgttggcggcggagtcgatggcttgcaggaggccgcagccccggggggccacgatggttccccgcggggcgcgaggggaggcggaagctgggggtgtgttcagaagcggtgacgcgggcgggcccccggaggtagggggggttccggccccacaggcatgggcggcaggggcacgtcttcgccgcgcgcgggcaggggctggtgctggctccgaagagcgcttgcgtgcgcgacgacgcgacggttggtgtcctgtatctgacgcctctgagtgaagaccacgggtcccgtgaccttgaacctgaaagagagttcgacagaatcaatctcggcatcgttgacagcggcctggcgcaggatctcctgcacgtcgcccgagttgtcctggtaggcgatctctgccatgaactgctcgatctcttcttcctggagatctcctcgtccggcgcgctccacggtggccgccaggtcgttggagatgcgacccatgagctgtgagaaggcgttgagcccgccctcgttccagacccggctgtagaccacgcccccctcggcgtcgcgagcgcgcatgaccacctgggccaggttgagctccacgtgtcgcgtgaagacggcgtagttgcgcaggcgctggaaaaggtagttcagggtggtggcggtgtgctcggcgacgaagaagtacatgacccagcgccgcaacgtggattcattgatgtcccccaaggcctccaggcgctccatggcctcgtagaagtccacggcgaagttgaaaaactgggagttgcgagcggacacggtcaactcctcctccagaagacggatgagctcggcgacagtgttgcgcacctcgcgctcgaaggccacggggggcgcttcttcctcttccacctcttcttccatgatcgcttcttcttcttcctcagccgggacgggagggggcggcggcggcgggggaggggcgcggcggcggcggcggcgcaccgggaggcggtcgatgaagcgctcgatcatctccccccgcatgcggcgcatggtctcggtgacggcgcggccgttctcccgggggcgcagctcgaagacgccgcctctcatctcgccgcggggcgagcggccgtgaggtagcgagacggcgctgactatgcatcttaacaattgctgtgtaggtacaccgccgagggacctgattgagtccagatccaccggatccgaaaacctttggaggaaagcgtctatccagtcgcagtcgcaaggtaggctgagcaccgtggcgggcgggggcgggtctggagagttcctggcggagatgctgctgatgatgtaattaaagtaggcggtcttgagaaggcggatggtggacaggagcaccatgtctttgggtccggcctgttggatgcggaggcggtcggccatgccccaggcctcgttctgacaccggcgcaggtctttgtagtagtcttgcatgagtctttccaccggcacctcttctccttcctcttctccatctcgccggtggtttctcgcgccgcccatgcgcgtgaccccaaagcccctgagcggctgcagcagggccaggtcggcgaccacgcgctcggccaagatggcctgctgcacctgagtgagggtcctctcgaagtcatccatgtccacgaagcggtggtaggcgcccgtgttgatggtgtaggtgcagttggccatgacggaccagttgacggtctggtgtcccggctgcgagagctccgtgtaccgcaggcgcgagaaggcgcgggaatcgaacacgtagtcgttgcaagtccgcaccagatactggtagcccaccaggaagtgcggcggaggttggcgatagaggggccagcgctgggtggcgggggcgccgggcgccaggtcttccagcatgaggcggtggtatccgtagatgtacctggacatccaggtgatgccggcggcggtggtggtggcgcgcgcgtagtcgcggacccggttccagatgtttcgcaggggcgagaagtgttccatggtcggcacgctctggccggtgaggcgcgcgcagtcgttgacgctctatacacacacaaaaacgaaagcgtttacagggctttcgttctgtagcctggaggaaagtaaatgggttgggttgcggtgtgccccggttcgagaccaagctgagctcggccggctgaagccgcagctaacgtggtattggcagtcccgtctcgacccaggccctgtatcctccaggatacggtcgagagcccttttgctttcttggccaagcgcccgtggcgcgatctgggatagatggtcgcgatgagaggacaaaagcggctcgcttccgtagtctggagaaacaatcgccagggttgcgttgcggcgtaccccggttcgagcccctatggcggcttgaatcggccggaaccgcggctaacgagggccgtggcagccccgtcctcaggaccccgccagccgacttctccagttacgggagcgagccccttttgttttttattttttagatgcatcccgtgctgcggcagatgcgcccctcgccccggcccgatcagcagcagcaacagcaggcatgcagacccccctctcccctttccgccccggtcaccacggccgcggcggccgtgtcgggcgcggggggcgcgctggagtcagatgagccaccgcggcggcgacctaggcagtatctggacttggaagagggcgagggactggcgcggctgggggcgaactctccagagcgccacccgcgggtgcagttgaaaagggacgcgcgcgaggcgtacctgccgcggcagaacctgtttcgcgaccgcgggggcgaggagcccgaggagatgcgagactgcaggttccaagcggggcgcgagctgcggcgcgggctggacagacagcgcctgctgcgcgaggaggactttgagcccgacacgcagacgggcatcagccccgcgcgcgcgcacgtagccgcggccgacctggtgaccgcctacgagcagacggtaaaccaggagcgcaacttccaaaagagcttcaacaaccacgtgcgcacgctggtggcgcgcgaggaggtgaccctgggtctcatgcatctgtgggacctggtggaggcgatcgtgcagaaccccagcagcaagcccctgaccgcgcagctgttcctggtggtgcagcacagcagggacaacgaggccttcagggaggcgctgctgaacatcaccgagccggaggggcgctggctcctggacctgataaacatcctgcagagcatagtggtgcaggagcgcagcctgagcctggccgagaaggtggcggccatcaactactctatgctgagcctgggcaagttctacgcccgcaagatctacaagaccccctacgtgcccatagacaaggaggtgaagatagacagcttctacatgcgcatggcgctgaaggtgctgaccctgagcgacgacctgggagtgtaccgcaacgagcgcatccacaaggccgtgagcgccagccggcggcgcgagctgagcgaccgcgagctgatgcacagtctgcagcgcgcgctgaccggcgcgggcgagggcgacagggaggtcgagtcctacttcgacatgggggccgacctgcactggcagccgagccgccgcgccctggaggcggcgggggcgtacggcggccccctggcggccgatgaccaggaagaggaggactatgagctagaggagggcgagtacctggaggactgacctggctggtggtgttttggtatagatgcaagatccgaacgtggcggacccggcggtccgggcggcgctgcaaagccagccgtccggcattaactcctctgacgactgggccgcggccatgggtcgcatcatggccctgaccgcgcgcaaccccgaggctttcaggcagcagcctcaggccaaccggctggcggccatcttggaagcggtagtgcccgcgcgctccaaccccacccacgagaaggtgctggccatagtcaacgcgctggcggagagcagggccatccgcgcggacgaggccggactggtgtacgatgcgctgctgcagcgggtggcgcggtacaacagcggcaacgtgcagaccaacctggaccgcctggtgacggacgtgcgcgaggccgtggcgcagcgcgagcgcttgcatcaggacggtaacctgggctcgctggtggcgctaaacgccttcctcagcacccagccggccaacgtaccgcgggggcaggaggactacaccaactttttgagcgcgctgcggctgatggtgaccgaggtccctcagagcgaggtgtaccagtcggggcccgactacttcttccagaccagcagacagggcttgcaaaccgtgaacctgagccaggctttcaagaacctgcgggggctgtggggagtgaaggcgcccaccggcgaccgggctacggtgtccagcctgctaacccccaactcgcgcctgctgctgctgctgatcgcgcccttcacggacagcgggagcgtctcgcgggagacctatctgggccacctgctgacgctgtaccgcgaggccatcgggcaggcgcaggtggacgagcacaccttccaagagatcaccagcgtgagccacgcgctggggcaggaggacacgggcagcctgcaggcgaccctgaactacctgctgaccaacaggcggcagaagattcccacgctgcacagcctgacccaggaggaggagcgcatcttgcgctacgtgcagcagagcgtgagcctgaacctgatgcgcgacggcgtgacgcccagcgtggcgctggacatgaccgcgcgcaacatggaaccgggcatgtacgcctcccaccggccgtttatcaaccgcctgatggactacttgcatcgggcggcggccgtgaaccccgagtacttcactaatgccattctgaatccccactggatgccccctccgggtttctacaacggggactttgaggtgcccgaggtcaacgacgggttcctctgggatgacatggatgacagtgtgttctcacccaacccgctgcgcgccgcgtctctgcgattgaaggagggctctgacagggaaggaccgaggagtctggcctcctccctggctctgggagcggtgggcgccacgggcgcggcggcgcggggcagtagccccttccccagcctggcagactctctgaacagcgggcgggtgagcaggccccgcttgctaggcgaggaggagtatctgaacaactccctgctgcagcccgcgagggacaagaacgctcagcggcagcagtttcccaacaatgggatagagagcctggtggacaagatgtccagatggaagacgtatgcgcaggagtacaaggagtgggaggaccgccagccgcggcccttgccgccccctaggcagcgctggcagcggcgcgcgtccaaccgccgctggaggcaggggcccgaggacgatgatgactctgcagatgacagcagcgtgttggacctgggcgggagcgggaaccccttttcgcacctgcgcccacgcctgggcaagatgttttaaaagaaaaaaaaaataaaactcaccaaggccatggcgacgagcgttggttttttgttcccttccttagtatgcggcgcgcggcgatgttcgaggaggggcctcccccctcttacgagagcgcgatggggatttctcctgcggcgcccctgcagcctccctacgtgcctcctcggtacctgcaacctacaggggggagaaatagcatctgttactctgagctgcagcccctgtacgataccaccagactgtacctggtggacaacaagtccgcggacgtggcctccctgaactaccagaacgaccacagcgattttttgaccacggtgatccaaaacaacgacttcaccccaaccgaggccagcacccagaccataaacctggataacaggtcgaactggggcggcgacctgaagaccatcttgcacaccaacatgcccaacgtgaacgagttcatgttcaccaactcttttaaggcgcgggtgatggtggcgcgcgagcagggggaggcgaagtacgagtgggtggacttcacgctgcccgagggcaactactcagagaccatgactctcgacctgatgaacaatgcgatcgtggaacactatctgaaagtgggcaggcagaacggggtgaaggaaagcgatatcggggtcaagtttgacaccagaaacttccgtctgggctgggaccccgtgaccgggctggtcatgccgggggtctacaccaacgaggcctttcatcccgacatagtgcttctgcccggctgtggggtggacttcacccagagccggctgagcaacctgctgggcattcgcaagcggcagcctttccaggagggtttcaagatcacctatgaggatctgaaggggggcaacattcccgcgctccttgatctggacgcctacgaggagagcttgaaacccgaggagagcgctggcgacagcggcgagagtggcgaggagcaagccggcggcggtggcggcgcgtcggtagaaaacgaaagtacgcccgcagtggcggcggacgctgcggaggtcgagccggaggccatgcagcaggacgcagaggagggcgcacaggagggcgcgcagaaggacatgaacgatggggagatcaggggagacacattcgccacccggggcgaagaaaaagaggcagaggcggcggcggcggcgacggcggaggccgaaaccgaggttgaggcagaggcagagcccgagaccgaagttatggaagacatgaatgatggagaacgtaggggcgacacgttcgccacccggggcgaagagaaggcggcggaggcagaagccgcggctgaggaggcggctgcggctgcggccaagactgaggctgcggctaaggctgaggtcgaagccaatgttgcggttgaggctcaggctgaggaggaggcggcggctgaagcagttaaggaaaaggcccaggcagagcaggaagagaaaaaacctgtcattcaacctctaaaagaagatagcaaaaagcgcagttacaacgtcatcgagggcagcacctttacccagtaccgcagctggtacctggcgtacaactacggcgacccggtcaagggggtgcgctcgtggaccctgctctgcacgccggacgtcacctgcggctccgagcagatgtactggtcgctgccgaacatgatgcaagacccggtgaccttccgctccacgcggcaggttagcaacttcccggtggtgggcgccgaactgctgcccgtgcactccaagagtttttacaacgagcaggccgtctactcccagctgatccgccaggccacctctctgacccacgtgttcaatcgctttcccgagaaccagattttggcgcgcccgccggcccccaccatcaccaccgtgagtgaaaacgttcctgccctcacagatcacgggacgctaccgctgcgcaacagcatctcaggagtccagcgagtgaccattactgacgccagacgccggacctgcccctacgtttacaaggccttgggcatagtctcgccgcgcgtcctctccagtcgcactttttaaaacacatctacccacacgttccaaaatcatgtccgtactcatctcacccagcaacaacaccggctgggggctgcgcgcgcccagcaagatgtttggaggggcgaggaagcgctccgaccagcaccctgtgcgcgtgcgcggccactaccgcgcgccctggggagcgcacaagcgcgggcgcacagggcgcaccactgtggacgacgtcattgactccgtagtggagcaagcgcgccactacacacccggcgcgccgaccgcccccgccgtgtccaccgtggaccaggcgatcgaaagcgtggtacagggcgcgcggcactatgccaaccttaaaagtcgccgccgccgcgtggcccgccgccatcgccggagaccccgggccaccgccgccgcgcgccttactaaggctctgctcaggcgcgccaggcgaactggccaccgggccgccatgagggccgcacggcgggctgccgctgccgcaagcgtcgtggccccgcgggcacgaaggcgcgcggccgctgccgccgccgccgccatttccagcttggcctcgacgcggcgcggtaacatatactgggtgcgcgactcggtaaccggcacgcgggtacccgtgcgctttcgccccccgcggaattagcacaagacaacatacacactgagtctcctgctgttgtgtatcccagcggcgaccgtcagcagcggcgacatgtccaagcgcaaaattaaagaagagatgctccaggtcatcgcgccggagatctatgggcccccgaagaaggaggaggatgattacaagccccgcaagctaaagcgggtcaaaaagaaaaagaaagatgatgatgacgaggcggtggagtttgtccgccgcatggcacccaggcgccccgtgcagtggaagggccggcgcgtgcagcgcgttttgcgccccggcaccgcggtggtcttcacgcccggcgagcgctccacgcgcactttcaagcgggtgtacgatgaggtgtacggcgacgaggacctgttggagcaggccaaccagcgctttggggagtttgcatatgggaaacggccccgcgagagtctaaaagaggacctgctggcgctaccgctggacgagggcaatcccaccccgagtctgaagccggtaaccctgcaacaggtgctgcctttgagcgcgcccagcgagcataagcgagggttgaagcgcgaaggcggggacctggcgcccaccgtgcagttgatggtgcccaagcggcagaagctggaggacgtgctggagaaaatgaaagtagagcccgggatccagcccgagatcaaggtccgccccatcaagcaggtggcgcccggcgtgggagtccagaccgtggacgttaggattcccacggaggagatggaaacccaaaccgccactccctcttcggcggccagcgccaccaccggcaccgcttcggtagaggtgcagacggacccctggctacccgccaccgctgttgccgccgccgccccccgttcgcgcgggcgcaagagaaattatccagcggccagcgcgctcatgccccagtacgcactgcatccatccatcgtgcccacccccggctaccgcgggtactcgtaccgcccgcgcagatcagccggcactcgcggccgccgccgccgtgcgaccacaaccagccgccgccgtcgccgccgccgccagccagtgctgacccccgtgtctgtaaggaaggtggctcgctcggggagcacgctggtggtgcccagagcgcgctaccaccccagcatcgtttaaagccggtctctgtatggttcttgcagatatggccctcacttgtcgcctccgcttcccggtgccgggataccgaggaagaactcaccgccgcagaggcatggcgggcagcggtctccgcggcggccgtcgccatcgccggcgcgcaaaaagcaggcgcatgcgcggcggtgtgctgcctctgctaatcccgctaatcgccgcggcgatcggtgccgtacccgggatcgcctccgtggccctgcaggcgtcccagaaacgttgactcttgcaaccttgcaagcttgcattttttggaggaaaaataaaaaaaagtctagactctcacgctcgcttggtcctgtgactattttgtagaaaaaaagatggaagacatcaactttgcgtcgctggccccgcgtcacggctcgcgcccgttcatgggagactggacagatatcggcaccagcaatatgagcggtggcgccttcagctggggcagtctgtggagcggccttaaaaattttggttccaccattaagaactatggcaacaaagcgtggaacagcagcacgggccagatgctgagagacaagttgaaagagcagaacttccaggagaaggtggcgcagggcctggcctctggcatcagcggggtggtggacatagctaaccaggccgtgcagaaaaagataaacagtcatctggacccccgtcctcaggtggaggaaatgcctccagcgatggagacggtgtctcccgagggcaaaggcgaaaagcgcccgcggcccgacagagaagagaccctggtgtcacacaccgaggagccgccctcttacgaggaggcagtcaaggccggcctgcccaccactcgccccatagcccccatggccaccggtgtggtgggccacaggcaacacactcccgcaacactagatctgcccccgccgtccgagccgccgcgccagccaaaggcggcgacggtgcccgctccctccacttccgccgccaacagagtgcccctgcgccgcgccgcgagcggcccccgggcctcgcgagttagcggcaactggcagagcacactgaacagcatcgtgggcctgggagtgaggagtgtgaagcgccgccgttgctactgaatgagcaagctagctaacgtgttgtatgtgtgtatgcgtcctatgtcgccgccagaggagctgttgagccgccggcgccgtctgcactccagcgaatttcaagatggcgaccccatcgatgatgcctcagtggtcgtacatgcacatctcgggccaggacgcttcggagtacctgagccccgggctggtgcagttcgcccgcgccacagacacctacttcaacatgagtaacaagttcaggaaccccactgtggcgcccacccacgatgtgaccacggaccggtcgcagcgcctgacgctgcggttcatccccgtggatcgggaggacaccgcctactcttacaaggcgcggttcacgctggccgtgggcgacaaccgcgtgctggacatggcctccacttactttgacatcaggggggtgctggacaggggccccaccttcaagccctactcgggtactgcctacaactccctggcccccaagggcgctcccaattcttgcgagtgggaacaagatgaaccagctcaggcagcaatagctgaagatgaagaagaacttgaagaagaacaagctcaggacgaacaggcgcccactaagaaaacccatgtatacgcccaggcacctctttctggtgaaaaaattactaaggatggtttgcaaataggtgtggatgccacacaggcgggagataaccctatatatgctgataaaacattccaacccgaacctcagataggtgagtctcagtggaacgaggctgatgccacagtagcaggaggcagagtcttaaaaaagaccacccctatgagaccttgctatggatcctatgccaaacctactaatgccaatggcggtcaagggatcatggtggccaatgatcagggagcgcttgaatctaaagttgagatgcaatttttctccaccacaacgtctcttaatgtaagggaaggtgaaaacaatcttcagccaaaagtagtgctatacagcgaagatgttaacttggaatcccctgacactcatttgtcttacaaacctaaaaaggatgacaccaactctaaaatcatgttgggtcagcaagccatgcccaacagacccaacctcattgcttttagggacaactttattggacttatgtactacaacagcacaggcaacatgggagtgctggcaggacaggcctcccagctaaacgctgtggtagacttgcaagacagaaacacagagctgtcataccaactgatgcttgattccattggagacagatcaagatacttttccatgtggaaccaggcagtggacagctatgacccagatgtcagaatcattgaaaaccatggggttgaagatgagctgcccaactattgctttcccctgggcggtattggaattacagacacataccagtgcataaaaccaaccgcagctgctaataacactacatggtctaaggatgaagaatttagtgatcgcaatgaaataggggtgggaaacaacttcgccatggagatcaacatccaggccaacctctggaggaacttcctctatgcgaacgtggggctctacctgccagacaagctcaagtacaaccccaccaacgtggacatctctgacaaccccaacacctatgactacatgaacaagcgtgtggtggctcccggcctggtggactgctttgtcaatgtgggagccaggtggtccctggactacatggacaacgtcaaccccttcaaccaccaccgcaatgcgggtctgcgctaccgctccatgatcctgggcaacgggcgctacgtgcccttccacattcaggtgccccagaagttctttgccatcaagaacctcctcctcctgccgggctcctacacttacgagtggaacttcaggaaggatgtcaacatggtcctgcagagctctctgggcaatgaccttagggtggacggggccagcatcaagtttgacagcgtcaccctctatgctaccttcttccccatggctcacaacaccgcctccacgctcgaggccatgctgaggaacgacaccaacgaccagtccttcaatgactacctctctggggccaacatgctctaccccatccccgccaaggccaccaacgtgcccatctccattccctctcgcaactgggccgccttcagaggctgggcctttacccgccttaagaccaaggaaaccccctccctgggctcgggttttgacccctactttgtctactcgggatccatcccctacctggatggcaccttctacctcaaccacacttttaagaagatatccatcatgtatgactcctccgtcagctggccgggcaatgaccgcctgctcacccccaatgagttcgaggtcaagcgcgccgtggacggcgagggctacaacgtggcccagtgcaacatgaccaaggactggttcctggtgcagatgctggccaactacaacataggctaccagggcttctacatcccagagagctacaaggacaggatgtactccttcttcagaaatttccaacccatgagcaggcaggtggtggacgagaccaaatacaaggactatcaggccattggcatcactcaccagcacaacaactcgggattcgtgggctacctggctcccaccatgcgcgaggggcaggcctaccccgccaacttcccctacccgttgataggcaaaaccgcggtcgacagcgtcacccagaaaaagttcctctgcgaccgcaccctctggcgcatccccttctctagcaacttcatgtccatgggtgcgctcacggacctgggccagaacctgctctatgccaactccgcccatgcgctggacatgacttttgaggtggaccccatggacgagcccacccttctctatattgtgtttgaagtgttcgacgtggtcagagtgcaccagccgcaccgcggtgtcatcgagaccgtgtacctgcgcacgcccttctcggccggcaacgccaccacctaaggagacagcgccgccgcctgcatgacgggttccaccgagcaagagctcagggccatcgccagagacctgggatgcggaccctattttttgggcacctatgacaaacgcttcccgggcttcatctcccgagacaagctcgcctgcgccatcgtcaacacggccgcgcgcgagaccgggggcgtgcactggctggcctttggctgggacccgcgctccaaaacctgctacctcttcgacccctttggcttctccgatcagcgcctcagacagatctatgagtttgagtacgaggggctgctgcgccgcagcgcgcttgcctcctcgcccgaccgctgcatcacccttgagaagtccaccgagaccgtgcaggggccccactcggccgcctgcggtctcttctgctgcatgtttttgcacgcctttgtgcgctggccccagagtcccatggatcgcaaccccaccatgaacttgctcaagggagtgcccaacgccatgctccagagcccccaggtccagcccaccctgcgccacaaccaggaacagctctaccgcttcctggagcgccactccccctacttccgcagtcacagcgcgcacatccggggggccacctctttctgccacttgcaagaaaacatgcaagacggaaaatgatgtacagctcgctttttaataaatgtaaagactgtgcactttatttatacacgggctctttctggttatttattcaacaccgccgtcgccatctagaaatcgaaagggttctgccgcgcgtcgccgtgcgccacgggcagagacacgttgcgatactggaagcggctcgcccacttaaactcgggcaccaccatgcggggcagtggttcctcggggaagttctcgccccacagggtgcgggtcagctgcagcgcgctcaggaggtcgggagccgagatcttgaagtcgcagttggggccggaaccctgcgcgcgcgagttgcggtacacggggttgcagcactggaacaccagcagggccggattatgcacgctggccagcaggctctcgtcgctgatcatgtcgctgtccagatcctccgcgttgctcagggcgaacggggtcatcttgcagacctgcctgcccaggaaaggcggcagcccgggcttgccgttgcagtcgcagcgcaggggcatcagcaggtgcccgcggcccgactgcgcctgcgggtacagcgcgcgcatgaaggcttcgatctgcctgaaagccacctgcgtcttggctccctccgaaaagaacatcccacaggacttgctggagaactggttcgcgggacagctggcatcgtgcaggcagcagcgcgcgtcggtgttggcgatctgcaccacgttgcgaccccaccggttcttcactatcttggccttggaagcctgctccttcagcgcgcgctggccgttctcgctggtcacatccatctctatcacctgctccttgttgatcatgtttgtaccgtgcagacacttcaggtcgccctccgtctgggtgcagcggtgctcccacagcgcgcaaccggtgggctcccaatttttgtgggtcacccccgcgtaggcctgcaggtaggcctgcaagaagcgccccatcatggccacaaaggtcttctggctcgtaaaggtcagctgcaggccgcgatgctcttcgttcagccaggtcttgcagatggcggccagcgcctcggtctgctcgggcagcatcctaaaatttgtcttcaggtcgttatccacgtggtacttgtccatcatggcgcgcgccgcctccatgcccttctcccaggcggacaccatgggcaggcttagggggtttatcacttccaccggcgaggacaccgtactttcgatttcttcttcctccccctcttcccggcgcgcgcccacgctgctgcgcgctctcaccgcctgcaccaaggggtcgtcttcaggcaagcgccgcaccgagcgcttgccgcccttgacctgcttaatcagcaccggcgggttgctgaagcccaccatggtcagcgccgcctgctcttcttcgtcttcgctgtctaccactatctctggggaagggcttctccgctctgcggcggcgcgcttcttttttttcttgggagcggccgtgatggagtccgccacggcgacggaggtcgagggcgtggggctgggggtgcgcggtaccagggcctcgtcgccctcggactcttcctctgactccaggcggcggcggagtcgcttctttgggggcgcgcgcgtcagcggcggcggagacggggacggggacggggacgggacgccctccacagggggtggtcttcgcgcagacccgcggccgcgctcgggggtcttctcgagctggtcttggtcccgactggccattgtatcctcctcctcctaggcagagagacataaggagtctatcatgcaagtcgagaaggaggagagcttaaccaccccctctgagaccgccgatgcgcccgccgtcgccgtcgcccccgctgccgccgacgcgcccgccacaccgagcgacacccccgcggacccccccgccgacgcacccctgttcgaggaagcggccgtggagcaggacccgggctttgtctcggcagaggaggatttgcgagaggaggaggataaggagaagaagccctcagtgccaaaagatgataaagagcaagacgagcacgacgcagatgcacaccagggtgaagtcgggcggggggacggagggcatgacggcgccgactacctagacgaagggaacgacgtgctcttgaagcacctgcatcgtcagtgcgccattgtttgcgacgctctgcaggagcgcagcgaagtgcccctcagcgtggcggaggtcagccacgcctacgagctcagcctcttctccccccgggtgcccccccgccgccgcgaaaacggcacatgcgagcccaacccgcgcctcaacttctaccccgcctttgtggtacccgaggtcctggccacctatcacatcttctttcaaaattgcaagatccccctctcgtgccgcgccaaccgtagccgcgccgataagatgctggccctgcgccagggcgaccacatacctgatatcgccgctttggaagatgtaccaaagatcttcgagggtctgggtcgcaacgagaagcgggcagcaaactctctgcaacaggaaaacagcgaaaatgagagtcacaccggggtactggtggagctcgagggcgacaacgcccgcctggcggtggtcaagcgcagcatcgaggtcacccactttgcctaccccgcgctaaacctgccccccaaagtcatgaacgcggccatggacgggctgatcatgcgccgcggccggcccctcgctccagatgcaaacttgcatgaggagaccgaggacggccagcccgtggtcagcgacgagcagctggcgcgctggctggagaccgcggaccccgccgaactggaggagcggcgcaagatgatgatggccgtggtgctggtcaccgtagagctggagtgtctgcagcgcttcttcggcgaccccgagatgcagagaaaggtcgaggagaccctgcactacaccttccgccagggctacgtgcgccaggcttgcaagatctccaacgtggagctcagcaacctggtgtcctacctgggcatcttgcatgagaaccgcctcgggcagagcgtgctgcactccaccctgcgcggggaggcgcgccgcgactacgtgcgcgactgcgtttacctcttcctctgctacacctggcagacggccatgggggtctggcagcagtgcctggaggagcgcaacctcaaggagctggagaagctcctgcagcgcgcgctcaaagatctctggacgggctacaacgagcgctcggtggccgccgcgctggccgacctcatcttccccgagcgcctgctcaaaaccctccagcaggggctgcccgacttcaccagccaaagcatgttgcaaaacttcaggaactttatcctggagcgttctggcatcctacccgccacctgctgcgccctgcccagcgactttgtccccctcgtgtaccgcgagtgccccccgccgctgtggggtcactgctacctgttccaactggccaactacctgtcctaccacgcggacctcatggaggactccagcggcgaggggctcatggagtgccactgccgctgcaacctctgcacgccccaccgctccctggtctgcaacacccaactgctcagcgagagtcagattatcggtaccttcgagctacagggtccgtcctcctcagacgagaagtccgcggctccggggctaaaactcactccggggctgtggacttccgcctacctgcgcaaatttgtacctgaagactaccacgcccacgagatcaggttttacgaagaccaatcccgcccgcccaaggcggagctgaccgcctgcgtcatcacccagggcgagatcctaggccaattgcaagccatccaaaaagcccgccaagactttttgctgaagaagggtcggggggtgtatctggacccccagtcgggtgaggagctcaacccggttcccccgctgccgccgccgcgggaccttgcttcccaggataagcatcgccatggctcccagaaagaagcagcagcggccgccactgccgccaccccacatgctggaggaagaggaggaatactgggacagtcaggcagaggaggtttcggacgaggaggagccggagacggagatggaagagtgggaggaggacagcttagacgaggaggcttccgaagccgaagaggcagacgcaacaccgtcaccctcggccgcagccccctcgcaggcgcccccgaagtccgctcccagcatcagcagcaacagcagcgctataacctccgctcctccaccgccgcgacccacggccgaccgcagacccaaccgtagatgggacaccaccggaaccggggccggtaagtcctccgggagaggcaagcaagcgcagcgccaaggctaccgctcgtggcgcgctcacaagaacgccatagtcgcttgcttgcaagactgcggggggaacatctccttcgcccgccgcttcctgctcttccaccacggtgtggccttcccccgtaacgtcctgcattactaccgtcatctctacagcccctactgcggcggcagtgagccagagacggtcggcggcggcggcggcgcccgtttcggcgcctaggaagacccagggcaagacttcagccaagaaactcgcggcggccgcggcgaacgcggtcgcgggggccctgcgcctgacggtgaacgaacccctgtcgacccgcgaactgaggaaccgaatcttccccactctctatgccatcttccagcagagcagagggcaggatcaggaactgaaagtaaaaaacaggtctctgcgctccctcacccgcagctgtctgtatcacaagagcgaagaccagcttcggcgcacgctggaggacgctgaggcactcttcagcaaatactgcgcgctcactcttaaggactagctccgcgcccttctcgaatttaggcgggaacgcctacgtcatcgcagcgccgccgtcatgagcaaggacattcccacgccatacatgtggagctatcagccgcagatgggactcgcggcgggcgcctcccaagactactccacccgcatgaactggctcagtgccggcccacacatgatctcacaggttaatgatatccgcacccatcgaaaccaaatattggtggagcaggcggcaattaccaccacgccccgcaataatcccaaccccagggagtggcccgcgtccctggtgtatcaggaaattcccggccccaccaccgtactacttccgcgtgattcccaggccgaagtccaaatgactaactcaggggcacagctcgcgggcggctgtcgtcacagggtgcggcctcctcgccagggtataactcacctggagatccgaggcagaggtattcagctcaacgacgagtcggtgagctcctcgctcggtctcagacctgacgggaccttccagatagccggagccggccgatcttccttcacgccccgccaggcgtacctgactctgcaaagctcgtcctcggcgccgcgctcgggcggcatcgggactctccagttcgtgcaggagtttgtgccctcggtctacttcaaccccttctcgggctctcccggtcgctacccggaccagttcatctcgaactttgacgccgcgagggactcggtggacggctacgactgaatgtcgggtggacccggtgcagagcaacttcgcctgaagcacctcgaccactgccgccgccctcagtgctttgcccgctgtcagaccggtgagttccagtacttttccctgcccgactcgcacccggacggcccggcgcacggggtgcgctttttcatcccgagtcaggtgcgctctaccctaatcagggagtttaccgcccgtcccctactggcggagttggaaaaggggccttctatcctaaccattgcctgcatctgctctaaccctggattgcaccaagatctttgctgtcatttgtgtgctgagtataataaaggctgagatcagaatctactcgggctcctgtcgccatcctgtcaacgccaccgtccaagcccggcccgatcagcccgaggtgaacctcacctgcggtctgcaccggcgcctgaggaaatacctagcttggtactacaacagcactccctttgtggtttacaacagctttgaccaggacggggtctcactgagggataacctctcgaacctgagctactccatcaggaagaacagcaccctcgagctacttcctccttacctgcccgggacttaccagtgtgtcaccggtccctgcacccacacccacctgttgatcgtaaacgactctcttccgagaacagacctcaataactcctcttcgcagttccccagaacaggaggtgagctcaggaaaccccgggtaaagaagggtggacgagagttaacacttgtggggtttctggtgtatgtgacgctggtggtggctcttttgattaaggcttttccttccatgtctgaactctccctcttcttttatgaacaactcgactagtgctaacgggaccctacccaacgaatcgggattgaatatcggtaaccaggttgcagtttcacttttgattaccttcatagtcctcttcctgctagtgctgtcgcttctgtgcctgcggatcgggggctgctgcatccacgtttatatctggtgctggctgtttagaaggttcggagaccatcgcaggtagaataaacatgctgctgcttaccctctttgtcctggcgctggccgccagctgccaagccttttccgaggctgactttatagagccccagtgtaatgtgacttttaaagcccatgcacagcgttgtcatactataatcaaatgtgccaccgaacacgatgaataccttatccagtataaagataaatcacacaaagtggcacttgttgacatctggaaacccgaagaccctttggaatacaatgtgaccgttttccagggtgacctcttcaaaatttacaattacactttcccatttgaccagatgtgtgactttgtcatgtacatggaaaagcagcacaagctgtggcctccgactccccagggctgtgtggaaaatccaggctctttctgcatgatctctctctgtgtaactgtgctggcactaatactcacgcttttgtatatcagatttaaatcaaggcaaagcttcattgatgaaaagaaaatgccttaatcgctttcacgcttgattgctaacaccgggtttttatccgcagaatgattggaatcaccctactaatcacctccctccttgcgattgcccatgggttggaacgaatcgaagtccctgtgggggccaatgttaccctggtggggcctgtcggcaatgctacattaatgtgggaaaaatatactaaaaatcaatgggtctcttactgcactaacaaaaatagccacaagcccagagccatctgcgatgggcaaaatctaaccttgattgatgttcaattgctggatgcgggctactattatgggcagctgggtacaatgattaattactggagaccccacagagattacatgctccacgtagtaaagggtccccttagcagcccacccactaccacctctactacccccactaccaccactactcccaccaccagcactgccgcccagcctcctcatagcagaacaaccacttttatcaattccaagtcccactccccccacattgccggcgggccctccgcctcagactccgaaaccaccgagatctgcttctgcaaatgctctgacgccattgcccaggatttggaagatcacgaggaagatgagcatgacttcgcagatgcatgccaggcatcagagccagaagcgctgccggtggccctcaaacagtatgcagacccccacaccacccccgaccttcctccaccttcccagaagccaagtttcctgggggaaaatgaaactctgcctctctccatactcgctctgacatctgttgctatgttgaccgctctgctggtgcttctatgctctatatgctacctgatctgctgcagaaagaaaaaatctcacggccatgctcaccagcccctcatgcacttcccttaccctccagagctgggcgaccacaaactttaagtctgcagtaactatctgcccatcccttgtcagtcgacagcgatgagccccactaatctaacggcctctggacttacaacatcgtctcttaatgagaccaccgctcctcaagacctgtacgatggtgtctccgcgctggttaaccagtgggatcacctgggcatatggtggctcctcataggagcagtgaccctgtgcctaatcctggtctggatcatctgctgcatcaaaagcagaagacccaggcggcggcccatctacaggccctttgtcatcacacctgaagatgatgatgacaccacttccaggctgcagaggctaaagcagctactcttctcttttacagcatggtaaattgaatcatgcctcgcattttcatctacttgtctctccttccactttttctgggctcttctacattggccgctgtgtcccacatcgaggtagactgcctcacgcccttcacagtctacctgcttttcggctttgtcatctgcacctttgtctgcagcgttatcactgtagtgatctgcttcatacagtgcatcgactacgtctgcgtgcgggtggcttactttagacaccacccccagtatcgcaacagggacatagcggctctcctaagacttgtttaaaatcatggccaaattaactgtgattggtcttctgatcatctgctgcgtcctagccgcgattgggactcaagctcctaccaccaccagcgctcccagaaagagacatgtatcctgcagcttcaagcgtccctggaatataccccaatgctttactgatgaacctgaaatctctttggcttggtacttcagcgtcaccgcccttcttatcttctgcagtacggttattgcccttgccatctacccttcccttgacctgggctggaatgctgtcaactctatggaatatcccaccttcccagaaccagacctgccagacctggttgttctaaacgcgtttcctcctcctgctcccgttcaaaatcagtttcgccctccgtcccccacgcccactgaggtcagctactttaatctaacaggcggagatgactgaaaacctagacctagaaatggacggtctctgcagcgagcaacgcacactagagaggcgccggcaaaaagagctcgagcgtcttaaacaagagctccaagacgcggtggccatacaccagtgcaaaaaaggtgtcttctgtctggtaaaacaggccacgctcacctatgaaaaaacaggtgacacccaccgcctaggatacaagctgcccacacagcgccaaaagttcgccctcatgataggcgaacaacccatcaccgtgacccagcactccgtggagacagaaggctgcatacatgctccctgtaggggcgctgactgcctctacaccttgatcaaaaccctctgcggtctcagagaccttatccctttcaattaatcataactgtaatcaataaaaaatcacttacttgaaatctgatagcaagcctctgtccaattttttcagcaacacttccttcccctcctcccaactctggtactctaggcgcctcctagctgcaaacttcctccacagtctgaagggaatgtcagattcctcctcctgtccctccgcacccacgatcttcatgttgttgcagatgaaacgcgcgagatcgtctgacgagaccttcaaccccgtgtacccctacgataccgagatcgctccgacttctgtccctttccttacccctccctttgtgtcatccgcaggaatgcaagaaaatccagctggggtgctgtccctgcacttgtcagagccccttaccacccacaatggggccctgactctaaaaatggggggcggcctgaccctggacaaggaagggaatctcacttcccaaaacatcaccagtgtcgatccccctctcaaaaaaagcaagaacaacatcagccttcagaccgccgcacccctcgccgtcagctccggggccctaacactttttgccactccccccctagcggtcagtggtgacaaccttactgtgcagtctcaggcccctctcactttggaagactcaaaactaactctggccaccaaaggacccctaactgtgtccgaaggcaaacttgtcctagaaacagaggctcccctgcatgcaagtgacagcagcagcctgggccttagcgttacggccccacttagcattaacaatgacagcctaggactagatctgcaggcacccattgtctctcaaaatggaaaactggctctaaatgtagcaggccccctagctgtggccaatggcattaatgctttgacagtaggcacaggcaaaggtattggtctaaatgaaaccagcactcacttgcaagcaaagttggtcgcccccctaggctttgataccaatggcaacattaagctaagcgttgcaggaggcatgagactaaataatgacacacttatactagatgtaaactacccatttgaagctcaaggccaactaagtctaagagtgggccagggtccgctgtatgtagattctagcagccataacctgaccattagatgccttagaggattatacataacatcgtctaataaccaaaccggtctagaggccaacataaaactaacaaaaggccttgtctatgatggaaatgccatagcagtcaatgttggtcaaggattgcaatacagcactactgccacatcggaaggtgtgtatcctatacagtctaagataggtttgggaatggaatatgataccaacggagccatgatgacaaaactaggctctggactaagctttgacaattcaggagccattgtagtgggaaacaaaaatgatgacaggcttactctgtggactacaccagacccatctcctaactgtagaatttattctgaaaaagatactaaactaaccttggtgctgactaagtgtggcagccaaatcctaggcacagtatctgcccttgctgtcagaggcagccttgcgcccatcactaatgcatccagcatagtccaaatatttctaagatttgatgaaaatggactattgatgagcaactcatcgctagacggtgattactggaattacagaaatggggactccactaatagcacaccatatacaaatgcagtaggctttatgcctaatctagcagcctatcctaaaggtcaggctacagctgcaaaaagcagtattgtaagccaggtatacatggatggtgacactactaaacctataacactaaaaataaacttcaatggcattgatgaaacaacagaaaatacccctgttagtaaatattccatgacattctcatggagctggcccaccgcaagctacataggccacacttttgcaacaaactcttttactttctcctacatcgcccaagaataaagaaagcacagagatgcttgttttgatttcaaaattgtgtgcttttatttattttcagcttacagtatttccagtagtcattcgaataaagcttaatcaaactgcatgagaacccttccacatagcttaaattagcaccagtgcaaatggagaaaattcaacataccttttttatccagatatcagagaactctagtggtcagttttcccccaccctcccagctcacagaatacacagtcctttccccccggctggctttaaacaacactatctcattggtaacagacatattcttaggtgtaataatccacacggtctcttggcgggccaagcgctggtcggtgatgttaataaactccccaggcagctctttcaagttcacgtcgctgtccaactgctgaagcgctcgcggctccgactgcgcctctagcggaggcaacggcaacacccgatccttgatctataaaggagtagagtcataatcccccataagaatagggcggtgatgcagcaacaaggcgcgcagcaactcctgccgccgcctctccgtacgacaggaatgcaacggcgtggtggtctcctccgcgataatccgcaccgctcgcagcatcagcatcctcgtcctccgggcacagcagcgcatcctgatctcactgagatcggcgcagtaagtgcagcacaaaaccaagatgttatttaagatcccacagtgcaaagcactgtacccaaagctcatggcgggaaggacagcccccacgtgaccatcataccagatccttaggtaaatcaaatgacgacctctcataaacacgctggacatgtacatcacctccttgggcatgcgctgattcaccacctctcgataccacaagcatcgctgattaattaaagacccctcaagcaccatcctgaaccaggaagccagcacctgaccccccgccaggcactgcagggaccccggtgaattgcagtggcagtgaagactccagcgctcgtagccgtgaaccatagagccggtcattatatccacattggcacaacacaaacacactttcatacactttttcatgattagcagctcctctctagtcaggaccatatcccaaggaatcacccactcttgaatcaaggtaaatcccacacagcagggcaggcctctcacataactcacgttatgcatagtgagcgtgtcgcaatctggaaataccggatgatcttccatcaccgaagctcgcgtctccgtctcaaagggaggtaaacggtccctcgtgtagggacagtggcgggataatcgagatcgtgttgaacgtagagtcatgccaaagggaacagcggacgtactcatatttcctccagcagaaccaagtgcgcgcgtggcagctatccctgcgtcttctgtctcgccgcctgccccgctcggtgtagtagttgtaatacagccactccctcagaccgtcaaggcgctccctggcgtccggatctataacaacaccgtcctgcagcgccgccctgatgacatccaccaccgtagagtatgccaagcccagccaggaaatgcattcactttgacagcgagagataggaggagcgggaagagatggaagaaccatgatagtaaaagacttttattccaatcgatcctctacaatgtcaaagtgtagatctataagatgacactggtctcctccgctgagtcgatcaaaaataacagctaaaccacaaacaacacgattggtcaaatgctccacaagggcttgcagcataaaatcgcctcgaaagtccaccgcaagcataacatcaaagccaccgcccctatcatgatctataataaaaaccccacagctatccaccagacccataaagttttcatctctccatcgtgaaaaaatatttacaagctcctcctttaaatcacctccaaccaattgaaaaagttgagccaaaccgccctccaccttcattttcagcaagcgcatcatgattgcaaaaattcaggctcctgagacacctgtataagattgagaagcggaacgttaacgtcaatgtttcgctcgcgaagatcgcgcctcagtgcaagcatgatataatcccacaggtcggagcggatcagcgaggacatctccccgccaggaaccaactcaacggagcctatgctgattataatacgcatattcggggctatgctgaccagcacggcccccaaataggcgtactgcataggcggcgacaaaaagtgaacagtttgggttaaaaaatcaggcaaacagtcgcgcaaaaaagcaagaacatcataaccatgctcatgcaaatagatgcaagtaagctcaggaacgaccacagaaaaatgcacaatttttctctcaaacatgactgcgagccctgcaaaaaataaaaaagaaacattacacaagagtagcctgtcttacgatgggatagactactctaaccaacataagacgggccacaacatcgcccgcgtggccataaaaaaaattgtccgtgtgattaaaaagaagcacagatagctggccagtcatatccggagtcatcacgtgtgaacccgtgtagacccccgggttggacacatcggccaaacaaagaaagcggccaatgtacccaggaggaatcataacactaagacgaagatacaacagaataaccccatgagggggaataacaaagttagtaggtgaataaaaacgataaacacccgaaactccctcctgcgtaggcaaaatagcaccctccccttccaaaacaacatatagcgcttccacagcagccatgacaaaagactcaaaacactcaaaagactcagtcttaccaggaaaataaaagcactctcacagcaccagcactaatcagagtgtgaagagggccaagtgccgaacgagtatatataggaataaaaaatgacgtaaatgtgtaaaggtcagaaaacgcccagaaaaatacacagaccaacgcccgaaacgaaaacccgcgaaaaaatacccagaacttcctcaacaaccgccacttccggtttctcacggtacgtcacttccgcaagaaaagcaaaactacatttcccacatgtgtaaaaacgaaaccccgccccttgtaactgcccacaacttacatcatcaaaacataaactcctacgtcacccgccccgcctctccccgcccacctcattatcatattggccacaatccaaaataaggtatattattgatgatg

SEQ ID NO: 22 - DNA, 37232 bp, Gorilla beringei beringei
catcatcaataatataccttattttggattgtggccaatatgataatgaggtgggcggggagaggcggggcgggtgacgtaggacgcgcgagtagggttgggaggtgtggcggaagtgtggcatttgcaagtgggaggagctcacatgcaagcttccgtcgcggaaaatgtgacgtttttgatgagcgccgcctacctccggaagtgccaattttcgcgcgcttttcaccggatatcgtagtaattttgggcgggaccatgtaagatttggccattttcgcgcgaaaagtgaaacggggaagtgaaaactgaataatagggcgttagtcatagcgcgtaatatttaccgagggccgagggactttgaccgattacgtggaggactcgcccaggtgttttttacgtgaatttccgcgttccgggtcaaagtctccgtttttattgtcaccgtcatttgacgcggagggtatttaaacccgctgcgctcctcaagaggccactcttgagtgccagcgagaagagttttctcctctgctccgcttcggtgatcgaaaaatgagacacatagcctgcactccgggtcttttgtccggtcgggcggcggccgagcttttggacgctttgatcaatgatgtcctaagcgatgattttccgtctactacccactttagcccacctactcttcacgaactgtacgatctggatgtactggtggatgtgaacgatcccaacgaggaggcggtttctgcgttttttcccgagtctgcgctgttggccgctcaggagggatttgacctacacactccgccgcctattttagagtctccgctgccggagcccagtggtataccttatatgcctgaactgcttcccgaagtggtagacctgacctgccacgagcctggctttccgcccagcgacgatgagggtgagccttttgttttagactttgctgagatacctgggcacggttgcaggtcttgtgcatatcatcagagggttaccggagaccccgaggttaagtgttcgctgtgctatatgaggatgacctcttcctttatctacagtaagtttttgtctaggtgggcttttgggtaggtgggttttgtgtcagaacaggtgtaaacgttgcttgtgttttttgtacctgtaggtccggtgtccgagccagacccggagcccgaccgcgatcccgagccggatcccgagcctcctcgcaggacaaggaaactaccttccattctgtgcaagtctcagacacctgtaaggaccagcgaggcagacagcaccgactctggcacttctacctctccccctgaaattcacccagtggttcctctgggtatacataaacctgttgctgttaaagtttgcgggcgacgccctgcagtacagtgcattgaggacttgcttcacgatcccgaggaacctttggacttgagccttaaacgccctaggcaataaaccccacctaagtaataaaccccacctaagtaataaaccctgccgcccttggttattgagatgacgcccaatgtttgcttttgaatgacttcatgtgtgtaataaaagtgagtgtgatcataggtctcttgtttgtctgggcggggcttaagggtatataagtctcttggggctaaacttggttacacttgaccccaatggaggcgtgggggtgcttggaggagtttgcggacgtgcgccgtttgctggacgagagctctagcaatacctatactatttggaggtatctgtggggctctactcaggccaagttggtttccagaattaagcaggattacaagtgcgattttgaagagctttttagttcctgcggtgagcttttgcaatccttgaatctgggccatcaggctattttccaggaaaaggttctctcgactttggatttttccactcccgggcgcaccgccgcttgtgtggcttttgtgtcttttgtgcaagataaatggagcgaggagacccacctgagtcacggctacgtactggatttcatggcgatggctctttggagggctcacaacaaatggaagattcagaaggaactgtacggttccgccctacgtcgtccacttctgtcgcgacaggggctgaggtttcccgaccatcggcagcatcagaatctggaagacgagtcggaggagcgagcggaggagaagatcagcttgagagccggcctggaccctcctcaggaggaatgaatctcccgcaggtggttgacctgtttccagaactgagacgggtcctgactatcagggaggatggtcagtttgtgaagaagtttaagagggatcggggtgagggagatgatgaggcggctagcaatttagcttttagtctgatgactcgccaccgaccggaatgtattacctatcagcagattaaggagagttgtgccaacgagctggatcttttgggtcagaagtatagcatagaacagcttaccacttactggcttcagcctggggatgattgggaagaggcgatcagggtgtatgcaaaggtggccctgcggcccgattgcaagtataagattactaagttggttaatattagaaactgctgctatatttctgggaacggggccgaagtggagatagatactcaggacagggtggcttttaggtgttgcatgataaacatgtggcccgggatactggggatggatggggtggtattcatgaatgtgaggtttacgggccccaactttaatggcacggtgttcatgggcaacaccaacttgctcctgcatggtgcgagtttctatgggtttaataacacctgtatagaggcctggaccgatgtaaaggttcgaggttgttccttttatagctgttggaaggcggtggtgtgtcgccctaaaagcaggggttctgtgaaaaaatgcttgtttgaaaggtgcaccttaggcatcctctctgagggcaactccagggtgcgccataatgtggcttcgaactgcggttgcttcatgcaagtgaagggggtgagcgttatcaagcataactcggtgtgtggaaactgcgaggatcgcgcctcccagatgctgacctgctttgatggcaactgtcacctgttgaagaccattcatataagcagccaccccagaaaggcctggcccgtgtttgagcataacatcttgacccgctgctccttgcatctgggggtcaggaggggtatgttcctgccttaccagtgtaactttagccacactaaaatcctgctggaacccgagtgcatgaccaaggtcagcctgaatggtgtgtttgatgtgactctgaaaatctggaaggtgctgaggtatgatgagaccaggaccaggtgccgaccctgcgagtgcggcggcaagcacatgagaaatcagcctgtgatgttggatgtgaccgaggagcttaggcctgaccatctggtgctggcctgcaccagggccgagtttgggtctagcgatgaggataccgattgaggtgggtaaggtgggcgtggctagaagggtggggcgtgtataaattgggggtctaagggtctctctgttttgtcttgcaacagccgccgccatgagcgacaccggcaacagctttgatggaagcatctttagcccctatctgacagtgcgcatgcctcactgggctggagtgcgtcagaatgtgatgggttccaacgtggatggacgccccgttctgccttcaaattcgtctacaatggcctacgcgaccgtgggaggaactccgctggacgccgcgacctccgccgccgcctccgccgccgccgcgaccgcgcgcagcatggctacggacctttacagctctttggtggcgagcggcgcggcctctcgcgcgtctgctcgggatgagaaactgaccgctctgctgcttaaactggaagacttgacccgggagctgggtcaactgacccagcaggtctccagcttgcgtgagagcagccttgcctccccctaatggcccataatataaataaaagccagtctgtttggattaagcaagtgtatgttctttatttaactctccgcgcgcggtaagcccgggaccagcggtctcggtcgtttagggtgcggtggattctttccaacacgtggtacaggtggctctggatgtttagatacatgggcatgagtccatccctggggtggaggtagcaccactgcagagcttcgtgctcgggggtggtgttgtatatgatccagtcgtagcaggagcgctgggcgtggtgctgaaaaatgtccttaagcaagaggcttatagctagggggaggcccttggtgtaagtgtttacaaatctgctcagttgggaggggtgcatccggggggatataatgtgcatcttggactggatttttaggttggctatgttcccacccagatcccttctgggattcatgttgtgcaggaccaccagcacggtatatccagtgcacttgggaaatttatcgtggagcttagacgggaatgcatggaagaacttggagacgcccttgtggcctcccagattttccatacattcgtccatgatgatggcaatgggcccgtgggaagctgcctgagcaaaaatgtttctgggatcgctcacatcgtagttatgttccagggtgaggtcatcataggacatctttacgaatcgggggcggagggtcccggactgggggatgatggtaccctcgggccccggggcgtagttcccctcacagatctgcatctcccaggctttcatttcagagggagggatcatatccacctgcggagcgatgaaaaacacagtttctggcgcaggggagattaactgggatgagagcaggtttctgagcagctgtgactttccacagccggtgggcccatatatcacgcctatcaccggctgcagctggtagttaagagagctgcagctgccgtcctcccggagcaggggggccacctcgttcagcatatccctgacgtggatgttctccctgaccaattccgccagaaggcgctcgccgcccagcgaaagcagctcttgcaaggaagcaaaatttttcagcggttttaggccgtcggccgtgggcatgtttttcagcgtctgggtcagcagttccagcctgtcccacagctcggtgatgtgctctacggcatctcgatccagcagatctcctcgtttcgcgggttggggcggctttcgctgtagggcaccagccgatgggcgtccagcggggccagagtcatgtccttccatgggcgcagggtcctcgtcagggtggtctgggtcacggtgaaggggtgcgctccgggttgggcgctggccagggtgcgcttgaggctggttctgctggtgctgaatcgctgccgctcttcgccctgcgcgtcggccaggtagcatttgaccatggtctcgtagtcgagaccctcggcggcgtgccccttggcgcggagctttcccttggaggtggcgccgcacgaggggcactgcaggctcttcagggcgtagagcttgggagcgagaaacacggactctggggagtaggcgtccgcgccgcaggaagcgcagaccgtctcgcattccaccagccaagtgagctccgggcggtcagggtcaaaaaccaggttgcccccatgctttttgatgcgtttcttacctcggctctccatgaggcggtgtcccttctcggtgacgaagaggctgtccgtgtccccgtagaccgacttcaggggcctgtcttccagcggagtgcctctgtcctcctcgtagagaaactctgaccactctgagacgaaggcccgcgtccaggccaggacgaaggaggccacgtgggaggggtagcggtcgttgtccactagcgggtccaccttctccagggtgtgcaggcacatgtccccctcctccgcgtccagaaaagtgattggcttgtaggtgtaggacacgtgaccgggggttcccgacgggggggtataaaagggggtgggcgccctttcatcttcactctcttccgcatcgctgtctgcgagggccagctgctggggtaagtattccctctcgaaggcgggcatgacctcagcgctcaggttgtcagtttctaaaaatgaggaggatttgatgttcacctgtccggaggtgatacctttgagggtacctgggtccatctggtcagaaaacactatttttttgttgtcaagcttggtggcgaacgacccgtagagggcgttggagagcagcttggcgatggagcgcagggtctggtttttgtcgcggtcggctcgctccttggccgcgatgttgagttgcacgtactcgcgggccacgcacttccactcggggaagacggtggtgcgctcgtctgggattaggcgcaccctccagcctcggttgtgcagggtgaccatgtcgacgctggtggcgacctcgccgcgcaggcgctcgttggtccagcagaggcggccgcccttgcgcgagcagaaggggggtagggggtccagctggtcctcgtttggggggtccgcgtcgatggtgaagaccccggggagcaagcgcgggtcaaagtagtcgatcttgcaagcttgcatgtccagagcccgctgccattcgcgggcggcgagcgcgcgctcgtaggggttgaggggcgggccccagggcatggggtgggtgagcgcggaggcgtacatgccgcagatgtcatacacgtacaggggttccctgaggatgccgaggtaggtggggtagcagcgccccccgcggatgctggcgcgcacgtagtcatagagctcgtgggagggggccagcatgttgggcccgaggttggtgcgctgggggcgctcggcgcggaaggcgatctgcctgaagatggcatgggagttggaggagatggtgggccgctggaagacgttgaagcttgcttcttgcaagcccaccgagtccctgacgaaggaggcgtaggactcgcgcagcttgtgcaccagctcggcggtgacctggacgtcgagcgcgcagtagtcgagggtctcgcggatgatgtcatacttatcctcccccttctttttccacagctcgcggttgaggacgaactcttcgcggtctttccagtactcttggaggggaaacccgtccgtgtccgaacggtaagagcctagcatgtagaactggttgacggcctggtaggggcaacagcccttctccacgggcagcgcgtaggcctgcgccgccttgcggagggaggtgtgggtgagggcgaaagtgtccctgaccatgactttgaggtattgatgtttgaagtctgtgtcatcgcagccgccctgttcccacagggtgtagtccgtgcgctttttggagcgcgggttgggcagggagaaggtgaggtcattgaagaggatcttccccgctcgaggcatgaagtttctggtgatgcgaaagggccctgggaccgaggagcggttgttgatgacctgggcggccaggacgatctcgtcaaagccgtttatgttgtggcccacgatgtagagctccaaaaagcggggctggcccttgatggaggggagctttttgagttcctcgtaggtgagctcctcgggcgattccaggccgtgctcctccagggcccagtcttgcaagtgagggttggccgccaggaaggatcgccagaggtcgcgggccatgagggtctgcaggcggtcgcggaaggttctgaactgtcgccccacggccatcttttcgggggtgatgcagtagaaggtgagggggtctttctcccaggggtcccatctgagctctcgggcgaggtcgcgcgcggcggcgaccagagcctcgtcgccccccagtttcatgaccagcatgaagggcacgagctgcttgccaaaggctcccatccaagtgtaggtctctacatcgtaggtgacaaagaggcgctccgtgcgaggatgagagccgatcgggaagaactggatctcccgccaccagttggaggattggctgttgatgtggtgaaagtagaagtcccgtctgcgggccgagcactcgtgctggcttttgtaaaagcgaccgcagtactggcagcgctgcacgggttgtatatcttgcacgaggtgaacctggcgacctctgacgaggaagcgcagcgggaatctaagtcccccgcctggggtcccgtgtggctggtggtcttctactttggttgtctggccgccagcatctgtctcctggagggcgatggtggagcagaccaccacgccgcgagagccgcaggtccagatctcggcgctcggcgggcggagtttgatgacgacatcgcgcacattggagctgtccatggtctccagctcccgcggcggcaggtcagctgggagttcctggaggttcacctcgcagagacgggtcaaggcgcgggcagtgttgagatggtatctgatttcaaggggcgtgttggcggcggagtcgatggcttgcaggaggccgcagccccggggggccacgatggttccccgcggggcgcgaggggaggcggaagctgggggtgtgttcagaagcggtgacgcgggcgggcccccggaggtagggggggttccggccccacaggcatgggcggcaggggcacgtcttcgccgcgcgcgggcaggggctggtgctggctccgaagagcgcttgcgtgcgcgacgacgcgacggttggtgtcctgtatctgacgcctctgagtgaagaccacgggtcccgtgaccttgaacctgaaagagagttcgacagaatcaatctcggcatcgttgacagcggcctggcgcaggatctcctgcacgtcgcccgagttgtcctggtaggcgatctctgccatgaactgctcgatctcttcttcctggagatctcctcgtccggcgcgctccacggtggccgccaggtcgttggagatgcgacccatgagctgtgagaaggcgttgagcccgccctcgttccagacccggctgtagaccacgcccccctcggcgtcgcgagcgcgcatgaccacctgggccaggttgagctccacgtgtcgcgtgaagacggcgtagttgcgcaggcgctggaaaaggtagttcagggtggtggcggtgtgctcggcgacgaagaagtacatgacccagcgccgcaacgtggattcattgatgtcccccaaggcctccaggcgctccatggcctcgtagaagtccacggcgaagttgaaaaactgggagttgcgagcggacacggtcaactcctcctccagaagacggatgagctcggcgacagtgttgcgcacctcgcgctcgaaggccacggggggcgcttcttcctcttccacctcttcttccatgatcgcttcttcttcttcctcagccgggacgggagggggcggcggcggcgggggaggggcgcggcggcggcggcggcgcaccgggaggcggtcgatgaagcgctcgatcatctccccccgcatgcggcgcatggtctcggtgacggcgcggccgttctcccgggggcgcagctcgaagacgccgcctctcatctcgccgcggggcgagcggccgtgaggtagcgagacggcgctgactatgcatcttaacaattgctgtgtaggtacaccgccgagggacctgattgagtccagatccaccggatccgaaaacctttggaggaaagcgtctatccagtcgcagtcgcaaggtaggctgagcaccgtggcgggcgggggcgggtctggagagttcctggcggagatgctgctgatgatgtaattaaagtaggcggtcttgagaaggcggatggtggacaggagcaccatgtctttgggtccggcctgttggatgcggaggcggtcggccatgccccaggcctcgttctgacaccggcgcaggtctttgtagtagtcttgcatgagtctttccaccggcacctcttctccttcctcttctccatctcgccggtggtttctcgcgccgcccatgcgcgtgaccccaaagcccctgagcggctgcagcagggccaggtcggcgaccacgcgctcggccaagatggcctgctgcacctgagtgagggtcctctcgaagtcatccatgtccacgaagcggtggtaggcgcccgtgttgatggtgtaggtgcagttggccatgacggaccagttgacggtctggtgtcccggctgcgagagctccgtgtaccgcaggcgcgagaaggcgcgggaatcgaacacgtagtcgttgcaagtccgcaccagatactggtagcccaccaggaagtgcggcggaggttggcgatagaggggccagcgctgggtggcgggggcgccgggcgccaggtcttccagcatgaggcggtggtatccgtagatgtacctggacatccaggtgatgccggcggcggtggtggtggcgcgcgcgtagtcgcggacccggttccagatgtttcgcaggggcgagaagtgttccatggtcggcacgctctggccggtgaggcgcgcgcagtcgttgacgctctatacacacacaaaaacgaaagcgtttacagggctttcgttctgtagcctggaggaaagtaaatgggttgggttgcggtgtgccccggttcgagaccaagctgagctcggccggctgaagccgcagctaacgtggtattggcagtcccgtctcgacccaggccctgtatcctccaggatacggtcgagagcccttttgctttcttggccaagcgcccgtggcgcgatctgggatagatggtcgcgatgagaggacaaaagcggctcgcttccgtagtctggagaaacaatcgccagggttgcgttgcggcgtaccccggttcgagcccctatggcggcttgaatcggccggaaccgcggctaacgagggccgtggcagccccgtcctcaggaccccgccagccgacttctccagttacgggagcgagccccttttgttttttattttttagatgcatcccgtgctgcggcagatgcgcccctcgccccggcccgatcagcagcagcaacagcaggcatgcagacccccctctcccctttccgccccggtcaccacggccgcggcggccgtgtcgggcgcggggggcgcgctggagtcagatgagccaccgcggcggcgacctaggcagtatctggacttggaagagggcgagggactggcgcggctgggggcgaactctccagagcgccacccgcgggtgcagttgaaaagggacgcgcgcgaggcgtacctgccgcggcagaacctgtttcgcgaccgcgggggcgaggagcccgaggagatgcgagactgcaggttccaagcggggcgcgagctgcggcgcgggctggacagacagcgcctgctgcgcgaggaggactttgagcccgacacgcagacgggcatcagccccgcgcgcgcgcacgtagccgcggccgacctggtgaccgcctacgagcagacggtaaaccaggagcgcaacttccaaaagagcttcaacaaccacgtgcgcacgctggtggcgcgcgaggaggtgaccctgggtctcatgcatctgtgggacctggtggaggcgatcgtgcagaaccccagcagcaagcccctgaccgcgcagctgttcctggtggtgcagcacagcagggacaacgaggccttcagggaggcgctgctgaacatcaccgagccggaggggcgctggctcctggacctgataaacatcctgcagagcatagtggtgcaggagcgcagcctgagcctggccgagaaggtggcggccatcaactactctatgctgagcctgggcaagttctacgcccgcaagatctacaagaccccctacgtgcccatagacaaggaggtgaagatagacagcttctacatgcgcatggcgctgaaggtgctgaccctgagcgacgacctgggagtgtaccgcaacgagcgcatccacaaggccgtgagcgccagccggcggcgcgagctgagcgaccgcgagctgatgcacagtctgcagcgcgcgctgaccggcgcgggcgagggcgacagggaggtcgagtcctacttcgacatgggggccgacctgcactggcagccgagccgccgcgccctggaggcggcgggggcgtacggcggccccctggcggccgatgaccaggaagaggaggactatgagctagaggagggcgagtacctggaggactgacctggctggtggtgttttggtatagatgcaagatccgaacgtggcggacccggcggtccgggcggcgctgcaaagccagccgtccggcattaactcctctgacgactgggccgcggccatgggtcgcatcatggccctgaccgcgcgcaaccccgaggctttcaggcagcagcctcaggccaaccggctggcggccatcttggaagcggtagtgcccgcgcgctccaaccccacccacgagaaggtgctggccatagtcaacgcgctggcggagagcagggccatccgcgcggacgaggccggactggtgtacgatgcgctgctgcagcgggtggcgcggtacaacagcggcaacgtgcagaccaacctggaccgcctggtgacggacgtgcgcgaggccgtggcgcagcgcgagcgcttgcatcaggacggtaacctgggctcgctggtggcgctaaacgccttcctcagcacccagccggccaacgtaccgcgggggcaggaggactacaccaactttttgagcgcgctgcggctgatggtgaccgaggtccctcagagcgaggtgtaccagtcggggcccgactacttcttccagaccagcagacagggcttgcaaaccgtgaacctgagccaggctttcaagaacctgcgggggctgtggggagtgaaggcgcccaccggcgaccgggctacggtgtccagcctgctaacccccaactcgcgcctgctgctgctgctgatcgcgcccttcacggacagcgggagcgtctcgcgggagacctatctgggccacctgctgacgctgtaccgcgaggccatcgggcaggcgcaggtggacgagcacaccttccaagagatcaccagcgtgagccacgcgctggggcaggaggacacgggcagcctgcaggcgaccctgaactacctgctgaccaacaggcggcagaagattcccacgctgcacagcctgacccaggaggaggagcgcatcttgcgctacgtgcagcagagcgtgagcctgaacctgatgcgcgacggcgtgacgcccagcgtggcgctggacatgaccgcgcgcaacatggaaccgggcatgtacgcctcccaccggccgtttatcaaccgcctgatggactacttgcatcgggcggcggccgtgaaccccgagtacttcactaatgccattctgaatccccactggatgccccctccgggtttctacaacggggactttgaggtgcccgaggtcaacgacgggttcctctgggatgacatggatgacagtgtgttctcacccaacccgctgcgcgccgcgtctctgcgattgaaggagggctctgacagggaaggaccgaggagtctggcctcctccctggctctgggagcggtgggcgccacgggcgcggcggcgcggggcagtagccccttccccagcctggcagactctctgaacagcgggcgggtgagcaggccccgcttgctaggcgaggaggagtatctgaacaactccctgctgcagcccgcgagggacaagaacgctcagcggcagcagtttcccaacaatgggatagagagcctggtggacaagatgtccagatggaagacgtatgcgcaggagtacaaggagtgggaggaccgccagccgcggcccttgccgccccctaggcagcgctggcagcggcgcgcgtccaaccgccgctggaggcaggggcccgaggacgatgatgactctgcagatgacagcagcgtgttggacctgggcgggagcgggaaccccttttcgcacctgcgcccacgcctgggcaagatgttttaaaagaaaaaaaaaaataaaactcaccaaggccatggcgacgagcgttggttttttgttcccttccttagtatgcggcgcgcggcgatgttcgaggaggggcctcccccctcttacgagagcgcgatggggatttctcctgcggcgcccctgcagcctccctacgtgcctcctcggtacctgcaacctacaggggggagaaatagcatctgttactctgagctgcagcccctgtacgataccaccagactgtacctggtggacaacaagtccgcggacgtggcctccctgaactaccagaacgaccacagcgattttttgaccacggtgatccaaaacaacgacttcaccccaaccgaggccagcacccagaccataaacctggataacaggtcgaactggggcggcgacctgaagaccatcttgcacaccaacatgcccaacgtgaacgagttcatgttcaccaactcttttaaggcgcgggtgatggtggcgcgcgagcagggggaggcgaagtacgagtgggtggacttcacgctgcccgagggcaactactcagagaccatgactctcgacctgatgaacaatgcgatcgtggaacactatctgaaagtgggcaggcagaacggggtgaaggaaagcgatatcggggtcaagtttgacaccagaaacttccgtctgggctgggaccccgtgaccgggctggtcatgccgggggtctacaccaacgaggcctttcatcccgacatagtgcttctgcccggctgtggggtggacttcacccagagccggctgagcaacctgctgggcattcgcaagcggcagcctttccaggagggtttcaagatcacctatgaggatctgaaggggggcaacattcccgcgctccttgatctggacgcctacgaggagagcttgaaacccgaggagagcgctggcgacagcggcgagagtggcgaggagcaagccggcggcggtggcggcgcgtcggtagaaaacgaaagtacgcccgcagtggcggcggacgctgcggaggtcgagccggaggccatgcagcaggacgcagaggagggcgcacaggagggcgcgcagaaggacatgaacgatggggagatcaggggagacacattcgccacccggggcgaagaaaaagaggcagaggcggcggcggcggcgacggcggaggccgaaaccgaggttgaggcagaggcagagcccgagaccgaagttatggaagacatgaatgatggagaacgtaggggcgacacgttcgccacccggggcgaagagaaggcggcggaggcagaagccgcggctgaggaggcggctgcggctgcggccaagactgaggctgcggctaaggctgaggtcgaagccaatgttgcggttgaggctcaggctgaggaggaggcggcggctgaagcagttaaggaaaaggcccaggcagagcaggaagagaaaaaacctgtcattcaacctctaaaagaagatagcaaaaagcgcagttacaacgtcatcgagggcagcacctttacccagtaccgcagctggtacctggcgtacaactacggcgacccggtcaagggggtgcgctcgtggaccctgctctgcacgccggacgtcacctgcggctccgagcagatgtactggtcgctgccgaacatgatgcaagacccggtgaccttccgctccacgcggcaggttagcaacttcccggtggtgggcgccgaactgctgcccgtgcactccaagagtttttacaacgagcaggccgtctactcccagctgatccgccaggccacctctctgacccacgtgttcaatcgctttcccgagaaccagattttggcgcgcccgccggcccccaccatcaccaccgtgagtgaaaacgttcctgccctcacagatcacgggacgctaccgctgcgcaacagcatctcaggagtccagcgagtgaccattactgacgccagacgccggacctgcccctacgtttacaaggccttgggcatagtctcgccgcgcgtcctctccagtcgcactttttaaaacacatctacccacacgttccaaaatcatgtccgtactcatctcacccagcaacaacaccggctgggggctgcgcgcgcccagcaagatgtttggaggggcgaggaagcgctccgaccagcaccctgtgcgcgtgcgcggccactaccgcgcgccctggggagcgcacaagcgcgggcgcacagggcgcaccactgtggacgacgtcattgactccgtagtggagcaagcgcgccactacacacccggcgcgccgaccgcccccgccgtgtccaccgtggaccaggcgatcgaaagcgtggtacagggcgcgcggcactatgccaaccttaaaagtcgccgccgccgcgtggcccgccgccatcgccggagaccccgggccaccgccgccgcgcgccttactaaggctctgctcaggcgcgccaggcgaactggccaccgggccgccatgagggccgcacggcgggctgccgctgccgcaagcgtcgtggccccgcgggcacgaaggcgcgcggccgctgccgccgccgccgccatttccagcttggcctcgacgcggcgcggtaacatatactgggtgcgcgactcggtaaccggcacgcgggtacccgtgcgctttcgccccccgcggaattagcacaagacaacatacacactgagtctcctgctgttgtgtatcccagcggcgaccgtcagcagcggcgacatgtccaagcgcaaaattaaagaagagatgctccaggtcatcgcgccggagatctatgggcccccgaagaaggaggaggatgattacaagccccgcaagctaaagcgggtcaaaaagaaaaagaaagatgatgatgacgaggcggtggagtttgtccgccgcatggcacccaggcgccccgtgcagtggaagggccggcgcgtgcagcgcgttttgcgccccggcaccgcggtggtcttcacgcccggcgagcgctccacgcgcactttcaagcgggtgtacgatgaggtgtacggcgacgaggacctgttggagcaggccaaccagcgctttggggagtttgcatatgggaaacggccccgcgagagtctaaaagaggacctgctggcgctaccgctggacgagggcaatcccaccccgagtctgaagccggtaaccctgcaacaggtgctgcctttgagcgcgcccagcgagcataagcgagggttgaagcgcgaaggcggggacctggcgcccaccgtgcagttgatggtgcccaagcggcagaagctggaggacgtgctggagaaaatgaaagtagagcccgggatccagcccgagatcaaggtccgccccatcaagcaggtggcgcccggcgtgggagtccagaccgtggacgttaggattcccacggaggagatggaaacccaaaccgccactccctcttcggcggccagcgccaccaccggcaccgcttcggtagaggtgcagacggacccctggctacccgccaccgctgttgccgccgccgccccccgttcgcgcgggcgcaagagaaattatccagcggccagcgcgctcatgccccagtacgcactgcatccatccatcgtgcccacccccggctaccgcgggtactcgtaccgcccgcgcagatcagccggcactcgcggccgccgccgccgtgcgaccacaaccagccgccgccgtcgccgccgccgccagccagtgctgacccccgtgtctgtaaggaaggtggctcgctcggggagcacgctggtggtgcccagagcgcgctaccaccccagcatcgtttaaagccggtctctgtatggttcttgcagatatggccctcacttgtcgcctccgcttcccggtgccgggataccgaggaagaactcaccgccgcagaggcatggcgggcagcggtctccgcggcggccgtcgccatcgccggcgcgcaaaaagcaggcgcatgcgcggcggtgtgctgcctctgctaatcccgctaatcgccgcggcgatcggtgccgtacccgggatcgcctccgtggccctgcaggcgtcccagaaacgttgactcttgcaaccttgcaagcttgcattttttggaggaaaaaataaaaaaaaagtctagactctcacgctcgcttggtcctgtgactattttgtagaaaaaaagatggaagacatcaactttgcgtcgctggccccgcgtcacggctcgcgcccgttcatgggagactggacagatatcggcaccagcaatatgagcggtggcgccttcagctggggcagtctgtggagcggccttaaaaattttggttccaccattaagaactatggcaacaaagcgtggaacagcagcacgggccagatgctgagagacaagttgaaagagcagaacttccaggagaaggtggcgcagggcctggcctctggcatcagcggggtggtggacatagctaaccaggccgtgcagaaaaagataaacagtcatctggacccccgtcctcaggtggaggaaatgcctccagcgatggagacggtgtctcccgagggcaaaggcgaaaagcgcccgcggcccgacagagaagagaccctggtgtcacacaccgaggagccgccctcttacgaggaggcagtcaaggccggcctgcccaccactcgccccatagcccccatggccaccggtgtggtgggccacaggcaacacactcccgcaacactagatctgcccccgccgtccgagccgccgcgccagccaaaggcggcgacggtgcccgctccctccacttccgccgccaacagagtgcccctgcgccgcgccgcgagcggcccccgggcctcgcgagttagcggcaactggcagagcacactgaacagcatcgtgggcctgggagtgaggagtgtgaagcgccgccgttgctactgaatgagcaagctagctaacgtgttgtatgtgtgtatgcgtcctatgtcgccgccagaggagctgttgagccgccggcgccgtctgcactccagcgaatttcaagatggcgaccccatcgatgatgcctcagtggtcgtacatgcacatctcgggccaggacgcttcggagtacctgagccccgggctggtgcagttcgcccgcgccacagacacctacttcaacatgagtaacaagttcaggaaccccactgtggcgcccacccacgatgtgaccacggaccggtcgcagcgcctgacgctgcggttcatccccgtggatcgggaggacaccgcctactcttacaaggcgcggttcacgctggccgtgggcgacaaccgcgtgctggacatggcctccacttactttgacatcaggggggtgctggacaggggccccaccttcaagccctactcgggtactgcctacaactccctggcccccaagggcgctcccaattcttgcgagtgggaacaagatgaaccagctcaggcagcaatagctgaagatgaagaagaacttgaagaagaacaagctcaggacgaacaggcgcccactaagaaaacccatgtatacgcccaggcacctctttctggtgaaaaaattactaaggatggtttgcaaataggtgtggatgccacacaggcgggagataaccctatatatgctgataaaacattccaacccgaacctcagataggtgagtctcagtggaacgaggctgatgccacagtagcaggaggcagagtcttaaaaaagaccacccctatgagaccttgctatggatcctatgccaaacctactaatgccaatggcggtcaagggatcatggtggccaatgatcagggagcgcttgaatctaaagttgagatgcaatttttctccaccacaacgtctcttaatgtaagggaaggtgaaaacaatcttcagccaaaagtagtgctatacagcgaagatgttaacttggaatcccctgacactcatttgtcttacaaacctaaaaaggatgacaccaactctaaaatcatgttgggtcagcaagccatgcccaacagacccaacctcattgcttttagggacaactttattggacttatgtactacaacagcacaggcaacatgggagtgctggcaggacaggcctcccagctaaacgctgtggtagacttgcaagacagaaacacagagctgtcataccaactgatgcttgattccattggagacagatcaagatacttttccatgtggaaccaggcagtggacagctatgacccagatgtcagaatcattgaaaaccatggggttgaagatgagctgcccaactattgctttcccctgggcggtattggaattacagacacataccagtgcataaaaccaaccgcagctgctaataacactacatggtctaaggatgaagaatttagtgatcgcaatgaaataggggtgggaaacaacttcgccatggagatcaacatccaggccaacctctggaggaacttcctctatgcgaacgtggggctctacctgccagacaagctcaagtacaaccccaccaacgtggacatctctgacaaccccaacacctatgactacatgaacaagcgtgtggtggctcccggcctggtggactgctttgtcaatgtgggagccaggtggtccctggactacatggacaacgtcaaccccttcaaccaccaccgcaatgcgggtctgcgctaccgctccatgatcctgggcaacgggcgctacgtgcccttccacattcaggtgccccagaagttctttgccatcaagaacctcctcctcctgccgggctcctacacttacgagtggaacttcaggaaggatgtcaacatggtcctgcagagctctctgggcaatgaccttagggtggacggggccagcatcaagtttgacagcgtcaccctctatgctaccttcttccccatggctcacaacaccgcctccacgctcgaggccatgctgaggaacgacaccaacgaccagtccttcaatgactacctctctggggccaacatgctctaccccatccccgccaaggccaccaacgtgcccatctccattccctctcgcaactgggccgccttcagaggctgggcctttacccgccttaagaccaaggaaaccccctccctgggctcgggttttgacccctactttgtctactcgggatccatcccctacctggatggcaccttctacctcaaccacacttttaagaagatatccatcatgtatgactcctccgtcagctggccgggcaatgaccgcctgctcacccccaatgagttcgaggtcaagcgcgccgtggacggcgagggctacaacgtggcccagtgcaacatgaccaaggactggttcctggtgcagatgctggccaactacaacataggctaccagggcttctacatcccagagagctacaaggacaggatgtactccttcttcagaaatttccaacccatgagcaggcaggtggtggacgagaccaaatacaaggactatcaggccattggcatcactcaccagcacaacaactcgggattcgtgggctacctggctcccaccatgcgcgaggggcaggcctaccccgccaacttcccctacccgttgataggcaaaaccgcggtcgacagcgtcacccagaaaaagttcctctgcgaccgcaccctctggcgcatccccttctctagcaacttcatgtccatgggtgcgctcacggacctgggccagaacctgctctatgccaactccgcccatgcgctggacatgacttttgaggtggaccccatggacgagcccacccttctctatattgtgtttgaagtgttcgacgtggtcagagtgcaccagccgcaccgcggtgtcatcgagaccgtgtacctgcgcacgcccttctcggccggcaacgccaccacctaaggagacagcgccgccgcctgcatgacgggttccaccgagcaagagctcagggccatcgccagagacctgggatgcggaccctattttttgggcacctatgacaaacgcttcccgggcttcatctcccgagacaagctcgcctgcgccatcgtcaacacggccgcgcgcgagaccgggggcgtgcactggctggcctttggctgggacccgcgctccaaaacctgctacctcttcgacccctttggcttctccgatcagcgcctcagacagatctatgagtttgagtacgaggggctgctgcgccgcagcgcgcttgcctcctcgcccgaccgctgcatcacccttgagaagtccaccgagaccgtgcaggggccccactcggccgcctgcggtctcttctgctgcatgtttttgcacgcctttgtgcgctggccccagagtcccatggatcgcaaccccaccatgaacttgctcaagggagtgcccaacgccatgctccagagcccccaggtccagcccaccctgcgccacaaccaggaacagctctaccgcttcctggagcgccactccccctacttccgcagtcacagcgcgcacatccggggggccacctctttctgccacttgcaagaaaacatgcaagacggaaaatgatgtacagctcgctttttaataaatgtaaagactgtgcactttatttatacacgggctctttctggttatttattcaacaccgccgtcgccatctagaaatcgaaagggttctgccgcgcgtcgccgtgcgccacgggcagagacacgttgcgatactggaagcggctcgcccacttaaactcgggcaccaccatgcggggcagtggttcctcggggaagttctcgccccacagggtgcgggtcagctgcagcgcgctcaggaggtcgggagccgagatcttgaagtcgcagttggggccggaaccctgcgcgcgcgagttgcggtacacggggttgcagcactggaacaccagcagggccggattatgcacgctggccagcaggctctcgtcgctgatcatgtcgctgtccagatcctccgcgttgctcagggcgaacggggtcatcttgcagacctgcctgcccaggaaaggcggcagcccgggcttgccgttgcagtcgcagcgcaggggcatcagcaggtgcccgcggcccgactgcgcctgcgggtacagcgcgcgcatgaaggcttcgatctgcctgaaagccacctgcgtcttggctccctccgaaaagaacatcccacaggacttgctggagaactggttcgcgggacagctggcatcgtgcaggcagcagcgcgcgtcggtgttggcgatctgcaccacgttgcgaccccaccggttcttcactatcttggccttggaagcctgctccttcagcgcgcgctggccgttctcgctggtcacatccatctctatcacctgctccttgttgatcatgtttgtaccgtgcagacacttcaggtcgccctccgtctgggtgcagcggtgctcccacagcgcgcaaccggtgggctcccaatttttgtgggtcacccccgcgtaggcctgcaggtaggcctgcaagaagcgccccatcatggccacaaaggtcttctggctcgtaaaggtcagctgcaggccgcgatgctcttcgttcagccaggtcttgcagatggcggccagcgcctcggtctgctcgggcagcatcctaaaatttgtcttcaggtcgttatccacgtggtacttgtccatcatggcgcgcgccgcctccatgcccttctcccaggcggacaccatgggcaggcttagggggtttatcacttccaccggcgaggacaccgtactttcgatttcttcttcctccccctcttcccggcgcgcgcccacgctgctgcgcgctctcaccgcctgcaccaaggggtcgtcttcaggcaagcgccgcaccgagcgcttgccgcccttgacctgcttaatcagcaccggcgggttgctgaagcccaccatggtcagcgccgcctgctcttcttcgtcttcgctgtctaccactatctctggggaagggcttctccgctctgcggcggcgcgcttcttttttttcttgggagcggccgtgatggagtccgccacggcgacggaggtcgagggcgtggggctgggggtgcgcggtaccagggcctcgtcgccctcggactcttcctctgactccaggcggcggcggagtcgcttctttgggggcgcgcgcgtcagcggcggcggagacggggacggggacggggacgggacgccctccacagggggtggtcttcgcgcagacccgcggccgcgctcgggggtcttctcgagctggtcttggtcccgactggccattgtatcctcctcctcctaggcagagagacataaggagtctatcatgcaagtcgagaaggaggagagcttaaccaccccctctgagaccgccgatgcgcccgccgtcgccgtcgcccccgctgccgccgacgcgcccgccacaccgagcgacacccccgcggacccccccgccgacgcacccctgttcgaggaagcggccgtggagcaggacccgggctttgtctcggcagaggaggatttgcgagaggaggaggataaggagaagaagccctcagtgccaaaagatgataaagagcaagacgagcacgacgcagatgcacaccagggtgaagtcgggcggggggacggagggcatgacggcgccgactacctagacgaagggaacgacgtgctcttgaagcacctgcatcgtcagtgcgccattgtttgcgacgctctgcaggagcgcagcgaagtgcccctcagcgtggcggaggtcagccacgcctacgagctcagcctcttctccccccgggtgcccccccgccgccgcgaaaacggcacatgcgagcccaacccgcgcctcaacttctaccccgcctttgtggtacccgaggtcctggccacctatcacatcttctttcaaaattgcaagatccccctctcgtgccgcgccaaccgtagccgcgccgataagatgctggccctgcgccagggcgaccacatacctgatatcgccgctttggaagatgtaccaaagatcttcgagggtctgggtcgcaacgagaagcgggcagcaaactctctgcaacaggaaaacagcgaaaatgagagtcacaccggggtactggtggagctcgagggcgacaacgcccgcctggcggtggtcaagcgcagcatcgaggtcacccactttgcctaccccgcgctaaacctgccccccaaagtcatgaacgcggccatggacgggctgatcatgcgccgcggccggcccctcgctccagatgcaaacttgcatgaggagaccgaggacggccagcccgtggtcagcgacgagcagctggcgcgctggctggagaccgcggaccccgccgaactggaggagcggcgcaagatgatgatggccgtggtgctggtcaccgtagagctggagtgtctgcagcgcttcttcggcgaccccgagatgcagagaaaggtcgaggagaccctgcactacaccttccgccagggctacgtgcgccaggcttgcaagatctccaacgtggagctcagcaacctggtgtcctacctgggcatcttgcatgagaaccgcctcgggcagagcgtgctgcactccaccctgcgcggggaggcgcgccgcgactacgtgcgcgactgcgtttacctcttcctctgctacacctggcagacggccatgggggtctggcagcagtgcctggaggagcgcaacctcaaggagctggagaagctcctgcagcgcgcgctcaaagatctctggacgggctacaacgagcgctcggtggccgccgcgctggccgacctcatcttccccgagcgcctgctcaaaaccctccagcaggggctgcccgacttcaccagccaaagcatgttgcaaaacttcaggaactttatcctggagcgttctggcatcctacccgccacctgctgcgccctgcccagcgactttgtccccctcgtgtaccgcgagtgccccccgccgctgtggggtcactgctacctgttccaactggccaactacctgtcctaccacgcggacctcatggaggactccagcggcgaggggctcatggagtgccactgccgctgcaacctctgcacgccccaccgctccctggtctgcaacacccaactgctcagcgagagtcagattatcggtaccttcgagctacagggtccgtcctcctcagacgagaagtccgcggctccggggctaaaactcactccggggctgtggacttccgcctacctgcgcaaatttgtacctgaagactaccacgcccacgagatcaggttttacgaagaccaatcccgcccgcccaaggcggagctgaccgcctgcgtcatcacccagggcgagatcctaggccaattgcaagccatccaaaaagcccgccaagactttttgctgaagaagggtcggggggtgtatctggacccccagtcgggtgaggagctcaacccggttcccccgctgccgccgccgcgggaccttgcttcccaggataagcatcgccatggctcccagaaagaagcagcagcggccgccactgccgccaccccacatgctggaggaagaggaggaatactgggacagtcaggcagaggaggtttcggacgaggaggagccggagacggagatggaagagtgggaggaggacagcttagacgaggaggcttccgaagccgaagaggcagacgcaacaccgtcaccctcggccgcagccccctcgcaggcgcccccgaagtccgctcccagcatcagcagcaacagcagcgctataacctccgctcctccaccgccgcgacccacggccgaccgcagacccaaccgtagatgggacaccaccggaaccggggccggtaagtcctccgggagaggcaagcaagcgcagcgccaaggctaccgctcgtggcgcgctcacaagaacgccatagtcgcttgcttgcaagactgcggggggaacatctccttcgcccgccgcttcctgctcttccaccacggtgtggccttcccccgtaacgtcctgcattactaccgtcatctctacagcccctactgcggcggcagtgagccagagacggtcggcggcggcggcggcgcccgtttcggcgcctaggaagacccagggcaagacttcagccaagaaactcgcggcggccgcggcgaacgcggtcgcgggggccctgcgcctgacggtgaacgaacccctgtcgacccgcgaactgaggaaccgaatcttccccactctctatgccatcttccagcagagcagagggcaggatcaggaactgaaagtaaaaaacaggtctctgcgctccctcacccgcagctgtctgtatcacaagagcgaagaccagcttcggcgcacgctggaggacgctgaggcactcttcagcaaatactgcgcgctcactcttaaggactagctccgcgcccttctcgaatttaggcgggaacgcctacgtcatcgcagcgccgccgtcatgagcaaggacattcccacgccatacatgtggagctatcagccgcagatgggactcgcggcgggcgcctcccaagactactccacccgcatgaactggctcagtgccggcccacacatgatctcacaggttaatgatatccgcacccatcgaaaccaaatattggtggagcaggcggcaattaccaccacgccccgcaataatcccaaccccagggagtggcccgcgtccctggtgtatcaggaaattcccggccccaccaccgtactacttccgcgtgattcccaggccgaagtccaaatgactaactcaggggcacagctcgcgggcggctgtcgtcacagggtgcggcctcctcgccagggtataactcacctggagatccgaggcagaggtattcagctcaacgacgagtcggtgagctcctcgctcggtctcagacctgacgggaccttccagatagccggagccggccgatcttccttcacgccccgccaggcgtacctgactctgcaaagctcgtcctcggcgccgcgctcgggcggcatcgggactctccagttcgtgcaggagtttgtgccctcggtctacttcaaccccttctcgggctctcccggtcgctacccggaccagttcatctcgaactttgacgccgcgagggactcggtggacggctacgactgaatgtcgggtggacccggtgcagagcaacttcgcctgaagcacctcgaccactgccgccgccctcagtgctttgcccgctgtcagaccggtgagttccagtacttttccctgcccgactcgcacccggacggcccggcgcacggggtgcgctttttcatcccgagtcaggtgcgctctaccctaatcagggagtttaccgcccgtcccctactggcggagttggaaaaggggccttctatcctaaccattgcctgcatctgctctaaccctggattgcaccaagatctttgctgtcatttgtgtgctgagtataataaaggctgagatcagaatctactcgggctcctgtcgccatcctgtcaacgccaccgtccaagcccggcccgatcagcccgaggtgaacctcacctgcggtctgcaccggcgcctgaggaaatacctagcttggtactacaacagcactccctttgtggtttacaacagctttgaccaggacggggtctcactgagggataacctctcgaacctgagctactccatcaggaagaacagcaccctcgagctacttcctccttacctgcccgggacttaccagtgtgtcaccggtccctgcacccacacccacctgttgatcgtaaacgactctcttccgagaacagacctcaataactcctcttcgcagttccccagaacaggaggtgagctcaggaaaccccgggtaaagaagggtggacgagagttaacacttgtggggtttctggtgtatgtgacgctggtggtggctcttttgattaaggcttttccttccatgtctgaactctccctcttcttttatgaacaactcgactagtgctaacgggaccctacccaacgaatcgggattgaatatcggtaaccaggttgcagtttcacttttgattaccttcatagtcctcttcctgctagtgctgtcgcttctgtgcctgcggatcgggggctgctgcatccacgtttatatctggtgctggctgtttagaaggttcggagaccatcgcaggtagaataaacatgctgctgcttaccctctttgtcctggcgctggccgccagctgccaagccttttccgaggctgactttatagagccccagtgtaatgtgacttttaaagcccatgcacagcgttgtcatactataatcaaatgtgccaccgaacacgatgaataccttatccagtataaagataaatcacacaaagtggcacttgttgacatctggaaacccgaagaccctttggaatacaatgtgaccgttttccagggtgacctcttcaaaatttacaattacactttcccatttgaccagatgtgtgactttgtcatgtacatggaaaagcagcacaagctgtggcctccgactccccagggctgtgtggaaaatccaggctctttctgcatgatctctctctgtgtaactgtgctggcactaatactcacgcttttgtatatcagatttaaatcaaggcaaagcttcattgatgaaaagaaaatgccttaatcgctttcacgcttgattgctaacaccgggtttttatccgcagaatgattggaatcaccctactaatcacctccctccttgcgattgcccatgggttggaacgaatcgaagtccctgtgggggccaatgttaccctggtggggcctgtcggcaatgctacattaatgtgggaaaaatatactaaaaatcaatgggtctcttactgcactaacaaaaatagccacaagcccagagccatctgcgatgggcaaaatctaaccttgattgatgttcaattgctggatgcgggctactattatgggcagctgggtacaatgattaattactggagaccccacagagattacatgctccacgtagtaaagggtccccttagcagcccacccactaccacctctactacccccactaccaccactactcccaccaccagcactgccgcccagcctcctcatagcagaacaaccacttttatcaattccaagtcccactccccccacattgccggcgggccctccgcctcagactccgaaaccaccgagatctgcttctgcaaatgctctgacgccattgcccaggatttggaagatcacgaggaagatgagcatgacttcgcagatgcatgccaggcatcagagccagaagcgctgccggtggccctcaaacagtatgcagacccccacaccacccccgaccttcctccaccttcccagaagccaagtttcctgggggaaaatgaaactctgcctctctccatactcgctctgacatctgttgctatgttgaccgctctgctggtgcttctatgctctatatgctacctgatctgctgcagaaagaaaaaatctcacggccatgctcaccagcccctcatgcacttcccttaccctccagagctgggcgaccacaaactttaagtctgcagtaactatctgcccatcccttgtcagtcgacagcgatgagccccactaatctaacggcctctggacttacaacatcgtctcttaatgagaccaccgctcctcaagacctgtacgatggtgtctccgcgctggttaaccagtgggatcacctgggcatatggtggctcctcataggagcagtgaccctgtgcctaatcctggtctggatcatctgctgcatcaaaagcagaagacccaggcggcggcccatctacaggccctttgtcatcacacctgaagatgatgatgacaccacttccaggctgcagaggctaaagcagctactcttctcttttacagcatggtaaattgaatcatgcctcgcattttcatctacttgtctctccttccactttttctgggctcttctacattggccgctgtgtcccacatcgaggtagactgcctcacgcccttcacagtctacctgcttttcggctttgtcatctgcacctttgtctgcagcgttatcactgtagtgatctgcttcatacagtgcatcgactacgtctgcgtgcgggtggcttactttagacaccacccccagtatcgcaacagggacatagcggctctcctaagacttgtttaaaatcatggccaaattaactgtgattggtcttctgatcatctgctgcgtcctagccgcgattgggactcaagctcctaccaccaccagcgctcccagaaagagacatgtatcctgcagcttcaagcgtccctggaatataccccaatgctttactgatgaacctgaaatctctttggcttggtacttcagcgtcaccgcccttcttatcttctgcagtacggttattgcccttgccatctacccttcccttgacctgggctggaatgctgtcaactctatggaatatcccaccttcccagaaccagacctgccagacctggttgttctaaacgcgtttcctcctcctgctcccgttcaaaatcagtttcgccctccgtcccccacgcccactgaggtcagctactttaatctaacaggcggagatgactgaaaacctagacctagaaatggacggtctctgcagcgagcaacgcacactagagaggcgccggcaaaaagagctcgagcgtcttaaacaagagctccaagacgcggtggccatacaccagtgcaaaaaaggtgtcttctgtctggtaaaacaggccacgctcacctatgaaaaaacaggtgacacccaccgcctaggatacaagctgcccacacagcgccaaaagttcgccctcatgataggcgaacaacccatcaccgtgacccagcactccgtggagacagaaggctgcatacatgctccctgtaggggcgctgactgcctctacaccttgatcaaaaccctctgcggtctcagagaccttatccctttcaattaatcataactgtaatcaataaaaaatcacttacttgaaatctgatagcaagcctctgtccaattttttcagcaacacttccttcccctcctcccaactctggtactctaggcgcctcctagctgcaaacttcctccacagtctgaagggaatgtcagattcctcctcctgtccctccgcacccacgatcttcatgttgttgcagatgaaacgcgcgagatcgtctgacgagaccttcaaccccgtgtacccctacgataccgagatcgctccgacttctgtccctttccttacccctccctttgtgtcatccgcaggaatgcaagaaaatccagctggggtgctgtccctgcacttgtcagagccccttaccacccacaatggggccctgactctaaaaatggggggcggcctgaccctggacaaggaagggaatctcacttcccaaaacatcaccagtgtcgatccccctctcaaaaaaagcaagaacaacatcagccttcagaccgccgcacccctcgccgtcagctccggggccctaacactttttgccactccccccctagcggtcagtggtgacaaccttactgtgcagtctcaggcccctctcactttggaagactcaaaactaactctggccaccaaaggacccctaactgtgtccgaaggcaaacttgtcctagaaacagaggctcccctgcatgcaagtgacagcagcagcctgggccttagcgttacggccccacttagcattaacaatgacagcctaggactagatctgcaggcacccattgtctctcaaaatggaaaactggctctaaatgtagcaggccccctagctgtggccaatggcattaatgctttgacagtaggcacaggcaaaggtattggtctaaatgaaaccagcactcacttgcaagcaaagttggtcgcccccctaggctttgataccaatggcaacattaagctaagcgttgcaggaggcatgagactaaataatgacacacttatactagatgtaaactacccatttgaagctcaaggccaactaagtctaagagtgggccagggtccgctgtatgtagattctagcagccataacctgaccattagatgccttagaggattatacataacatcgtctaataaccaaaccggtctagaggccaacataaaactaacaaaaggccttgtctatgatggaaatgccatagcagtcaatgttggtcaaggattgcaatacagcactactgccacatcggaaggtgtgtatcctatacagtctaagataggtttgggaatggaatatgataccaacggagccatgatgacaaaactaggctctggactaagctttgacaattcaggagccattgtagtgggaaacaaaaatgatgacaggcttactctgtggactacaccagacccatctcctaactgtagaatttattctgaaaaagatactaaactaaccttggtgctgactaagtgtggcagccaaatcctaggcacagtatctgcccttgctgtcagaggcagccttgcgcccatcactaatgcatccagcatagtccaaatatttctaagatttgatgaaaatggactattgatgagcaactcatcgctagacggtgattactggaattacagaaatggggactccactaatagcacaccatatacaaatgcagtaggctttatgcctaatctagcagcctatcctaaaggtcaggctacagctgcaaaaagcagtattgtaagccaggtatacatggatggtgacactactaaacctataacactaaaaataaacttcaatggcattgatgaaacaacagaaaatacccctgttagtaaatattccatgacattctcatggagctggcccaccgcaagctacataggccacacttttgcaacaaactcttttactttctcctacatcgcccaagaataaagaaagcacagagatgcttgttttgatttcaaaattgtgtgcttttatttattttcagcttacagtatttccagtagtcattcgaataaagcttaatcaaactgcatgagaacccttccacatagcttaaattagcaccagtgcaaatggagaaaattcaacataccttttttatccagatatcagagaactctagtggtcagttttcccccaccctcccagctcacagaatacacagtcctttccccccggctggctttaaacaacactatctcattggtaacagacatattcttaggtgtaataatccacacggtctcttggcgggccaagcgctggtcggtgatgttaataaactccccaggcagctctttcaagttcacgtcgctgtccaactgctgaagcgctcgcggctccgactgcgcctctagcggaggcaacggcaacacccgatccttgatctataaaggagtagagtcataatcccccataagaatagggcggtgatgcagcaacaaggcgcgcagcaactcctgccgccgcctctccgtacgacaggaatgcaacggcgtggtggtctcctccgcgataatccgcaccgctcgcagcatcagcatcctcgtcctccgggcacagcagcgcatcctgatctcactgagatcggcgcagtaagtgcagcacaaaaccaagatgttatttaagatcccacagtgcaaagcactgtacccaaagctcatggcgggaaggacagcccccacgtgaccatcataccagatccttaggtaaatcaaatgacgacctctcataaacacgctggacatgtacatcacctccttgggcatgcgctgattcaccacctctcgataccacaagcatcgctgattaattaaagacccctcaagcaccatcctgaaccaggaagccagcacctgaccccccgccaggcactgcagggaccccggtgaattgcagtggcagtgaagactccagcgctcgtagccgtgaaccatagagccggtcattatatccacattggcacaacacaaacacactttcatacactttttcatgattagcagctcctctctagtcaggaccatatcccaaggaatcacccactcttgaatcaaggtaaatcccacacagcagggcaggcctctcacataactcacgttatgcatagtgagcgtgtcgcaatctggaaataccggatgatcttccatcaccgaagctcgcgtctccgtctcaaagggaggtaaacggtccctcgtgtagggacagtggcgggataatcgagatcgtgttgaacgtagagtcatgccaaagggaacagcggacgtactcatatttcctccagcagaaccaagtgcgcgcgtggcagctatccctgcgtcttctgtctcgccgcctgccccgctcggtgtagtagttgtaatacagccactccctcagaccgtcaaggcgctccctggcgtccggatctataacaacaccgtcctgcagcgccgccctgatgacatccaccaccgtagagtatgccaagcccagccaggaaatgcattcactttgacagcgagagataggaggagcgggaagagatggaagaaccatgatagtaaaagacttttattccaatcgatcctctacaatgtcaaagtgtagatctataagatgacactggtctcctccgctgagtcgatcaaaaataacagctaaaccacaaacaacacgattggtcaaatgctccacaagggcttgcagcataaaatcgcctcgaaagtccaccgcaagcataacatcaaagccaccgcccctatcatgatctataataaaaaccccacagctatccaccagacccataaagttttcatctctccatcgtgaaaaaatatttacaagctcctcctttaaatcacctccaaccaattgaaaaagttgagccaaaccgccctccaccttcattttcagcaagcgcatcatgattgcaaaaattcaggctcctgagacacctgtataagattgagaagcggaacgttaacgtcaatgtttcgctcgcgaagatcgcgcctcagtgcaagcatgatataatcccacaggtcggagcggatcagcgaggacatctccccgccaggaaccaactcaacggagcctatgctgattataatacgcatattcggggctatgctgaccagcacggcccccaaataggcgtactgcataggcggcgacaaaaagtgaacagtttgggttaaaaaatcaggcaaacagtcgcgcaaaaaagcaagaacatcataaccatgctcatgcaaatagatgcaagtaagctcaggaacgaccacagaaaaatgcacaatttttctctcaaacatgactgcgagccctgcaaaaaataaaaaagaaacattacacaagagtagcctgtcttacgatgggatagactactctaaccaacataagacgggccacaacatcgcccgcgtggccataaaaaaaattgtccgtgtgattaaaaagaagcacagatagctggccagtcatatccggagtcatcacgtgtgaacccgtgtagacccccgggttggacacatcggccaaacaaagaaagcggccaatgtacccaggaggaatcataacactaagacgaagatacaacagaataaccccatgagggggaataacaaagttagtaggtgaataaaaacgataaacacccgaaactccctcctgcgtaggcaaaatagcaccctccccttccaaaacaacatatagcgcttccacagcagccatgacaaaagactcaaaacactcaaaagactcagtcttaccaggaaaataaaagcactctcacagcaccagcactaatcagagtgtgaagagggccaagtgccgaacgagtatatataggaataaaaaatgacgtaaatgtgtaaaggtcagaaaacgcccagaaaaatacacagaccaacgcccgaaacgaaaacccgcgaaaaaatacccagaacttcctcaacaaccgccacttccggtttctcacggtacgtcacttccgcaagaaaagcaaaactacatttcccacatgtgtaaaaacgaaaccccgccccttgtaactgcccacaacttacatcatcaaaacataaactcctacgtcacccgccccgcctctccccgcccacctcattatcatattggccacaatccaaaataaggtatattattgatgatg

SEQ ID NO: 23 - DNA, 37213 bp, Gorilla beringei beringei
ataatataccttattttggattgtggccaatatgataatgaggtgggcggggagaggcggggcgggtgacgtaggacgcgcgagtagggttgggaggtgtggcggaagtgtggcatttgcaagtgggaggagctcacatgcaagcttccgtcgcggaaaatgtgacgtttttgatgagcgccgcctacctccggaagtgccaattttcgcgcgcttttcaccggatatcgtagtaattttgggcgggaccatgtaagatttggccattttcgcgcgaaaagtgaaacggggaagtgaaaactgaataatagggcgttagtcatagcgcgtaatatttaccgagggccgagggactttgaccgattacgtggaggactcgcccaggtgttttttacgtgaatttccgcgttccgggtcaaagtctccgtttttattgtcaccgtcatttgacgcggagggtatttaaacccgctgcgctcctcaagaggccactcttgagtgccagcgagaagagttttctcctctgctccgcttcggtgatcgaaaaatgagacacatagcctgcactccgggtcttttgtccggtcgggcggcggccgagcttttggacgctttgatcaatgatgtcctaagcgatgattttccgtctactacccactttagcccacctactcttcacgaactgtacgatctggatgtactggtggatgtgaacgatcccaacgaggaggcggtttctgcgttttttcccgagtctgcgctgttggccgctcaggagggatttgacctacacactccgccgcctattttagagtctccgctgccggagcccagtggtataccttatatgcctgaactgcttcccgaagtggtagacctgacctgccacgagcctggctttccgcccagcgacgatgagggtgagccttttgttttagactttgctgagatacctgggcacggttgcaggtcttgtgcatatcatcagagggttaccggagaccccgaggttaagtgttcgctgtgctatatgaggatgacctcttcctttatctacagtaagtttttgtctaggtgggcttttgggtaggtgggttttgtgtcagaacaggtgtaaacgttgcttgtgttttttgtacctgtaggtccggtgtccgagccagacccggagcccgaccgcgatcccgagccggatcccgagcctcctcgcaggacaaggaaactaccttccattctgtgcaagtctcagacacctgtaaggaccagcgaggcagacagcaccgactctggcacttctacctctccccctgaaattcacccagtggttcctctgggtatacataaacctgttgctgttaaagtttgcgggcgacgccctgcagtacagtgcattgaggacttgcttcacgatcccgaggaacctttggacttgagccttaaacgccctaggcaataaaccccacctaagtaataaaccccacctaagtaataaaccctgccgcccttggttattgagatgacgcccaatgtttgcttttgaatgacttcatgtgtgtaataaaagtgagtgtgatcataggtctcttgtttgtctgggcggggcttaagggtatataagtctcttggggctaaacttggttacacttgaccccaatggaggcgtgggggtgcttggaggagtttgcggacgtgcgccgtttgctggacgagagctctagcaatacctatactatttggaggtatctgtggggctctactcaggccaagttggtttccagaattaagcaggattacaagtgcgattttgaagagctttttagttcctgcggtgagcttttgcaatccttgaatctgggccatcaggctattttccaggaaaaggttctctcgactttggatttttccactcccgggcgcaccgccgcttgtgtggcttttgtgtcttttgtgcaagataaatggagcgaggagacccacctgagtcacggctacgtactggatttcatggcgatggctctttggagggctcacaacaaatggaagattcagaaggaactgtacggttccgccctacgtcgtccacttctgtcgcgacaggggctgaggtttcccgaccatcggcagcatcagaatctggaagacgagtcggaggagcgagcggaggagaagatcagcttgagagccggcctggaccctcctcaggaggaatgaatctcccgcaggtggttgacctgtttccagaactgagacgggtcctgactatcagggaggatggtcagtttgtgaagaagtttaagagggatcggggtgagggagatgatgaggcggctagcaatttagcttttagtctgatgactcgccaccgaccggaatgtattacctatcagcagattaaggagagttgtgccaacgagctggatcttttgggtcagaagtatagcatagaacagcttaccacttactggcttcagcctggggatgattgggaagaggcgatcagggtgtatgcaaaggtggccctgcggcccgattgcaagtataagattactaagttggttaatattagaaactgctgctatatttctgggaacggggccgaagtggagatagatactcaggacagggtggcttttaggtgttgcatgataaacatgtggcccgggatactggggatggatggggtggtattcatgaatgtgaggtttacgggccccaactttaatggcacggtgttcatgggcaacaccaacttgctcctgcatggtgcgagtttctatgggtttaataacacctgtatagaggcctggaccgatgtaaaggttcgaggttgttccttttatagctgttggaaggcggtggtgtgtcgccctaaaagcaggggttctgtgaaaaaatgcttgtttgaaaggtgcaccttaggcatcctctctgagggcaactccagggtgcgccataatgtggcttcgaactgcggttgcttcatgcaagtgaagggggtgagcgttatcaagcataactcggtgtgtggaaactgcgaggatcgcgcctcccagatgctgacctgctttgatggcaactgtcacctgttgaagaccattcatataagcagccaccccagaaaggcctggcccgtgtttgagcataacatcttgacccgctgctccttgcatctgggggtcaggaggggtatgttcctgccttaccagtgtaactttagccacactaaaatcctgctggaacccgagtgcatgaccaaggtcagcctgaatggtgtgtttgatgtgactctgaaaatctggaaggtgctgaggtatgatgagaccaggaccaggtgccgaccctgcgagtgcggcggcaagcacatgagaaatcagcctgtgatgttggatgtgaccgaggagcttaggcctgaccatctggtgctggcctgcaccagggccgagtttgggtctagcgatgaggataccgattgaggtgggtaaggtgggcgtggctagaagggtggggcgtgtataaattgggggtctaagggtctctctgttttgtcttgcaacagccgccgccatgagcgacaccggcaacagctttgatggaagcatctttagcccctatctgacagtgcgcatgcctcactgggctggagtgcgtcagaatgtgatgggttccaacgtggatggacgccccgttctgccttcaaattcgtctacaatggcctacgcgaccgtgggaggaactccgctggacgccgcgacctccgccgccgcctccgccgccgccgcgaccgcgcgcagcatggctacggacctttacagctctttggtggcgagcggcgcggcctctcgcgcgtctgctcgggatgagaaactgaccgctctgctgcttaaactggaagacttgacccgggagctgggtcaactgacccagcaggtctccagcttgcgtgagagcagccttgcctccccctaatggcccataatataaataaaagccagtctgtttggattaagcaagtgtatgttctttatttaactctccgcgcgcggtaagcccgggaccagcggtctcggtcgtttagggtgcggtggattctttccaacacgtggtacaggtggctctggatgtttagatacatgggcatgagtccatccctggggtggaggtagcaccactgcagagcttcgtgctcgggggtggtgttgtatatgatccagtcgtagcaggagcgctgggcgtggtgctgaaaaatgtccttaagcaagaggcttatagctagggggaggcccttggtgtaagtgtttacaaatctgctcagttgggaggggtgcatccggggggatataatgtgcatcttggactggatttttaggttggctatgttcccacccagatcccttctgggattcatgttgtgcaggaccaccagcacggtatatccagtgcacttgggaaatttatcgtggagcttagacgggaatgcatggaagaacttggagacgcccttgtggcctcccagattttccatacattcgtccatgatgatggcaatgggcccgtgggaagctgcctgagcaaaaatgtttctgggatcgctcacatcgtagttatgttccagggtgaggtcatcataggacatctttacgaatcgggggcggagggtcccggactgggggatgatggtaccctcgggccccggggcgtagttcccctcacagatctgcatctcccaggctttcatttcagagggagggatcatatccacctgcggagcgatgaaaaacacagtttctggcgcaggggagattaactgggatgagagcaggtttctgagcagctgtgactttccacagccggtgggcccatatatcacgcctatcaccggctgcagctggtagttaagagagctgcagctgccgtcctcccggagcaggggggccacctcgttcagcatatccctgacgtggatgttctccctgaccaattccgccagaaggcgctcgccgcccagcgaaagcagctcttgcaaggaagcaaaatttttcagcggttttaggccgtcggccgtgggcatgtttttcagcgtctgggtcagcagttccagcctgtcccacagctcggtgatgtgctctacggcatctcgatccagcagatctcctcgtttcgcgggttggggcggctttcgctgtagggcaccagccgatgggcgtccagcggggccagagtcatgtccttccatgggcgcagggtcctcgtcagggtggtctgggtcacggtgaaggggtgcgctccgggttgggcgctggccagggtgcgcttgaggctggttctgctggtgctgaatcgctgccgctcttcgccctgcgcgtcggccaggtagcatttgaccatggtctcgtagtcgagaccctcggcggcgtgccccttggcgcggagctttcccttggaggtggcgccgcacgaggggcactgcaggctcttcagggcgtagagcttgggagcgagaaacacggactctggggagtaggcgtccgcgccgcaggaagcgcagaccgtctcgcattccaccagccaagtgagctccgggcggtcagggtcaaaaaccaggttgcccccatgctttttgatgcgtttcttacctcggctctccatgaggcggtgtcccttctcggtgacgaagaggctgtccgtgtccccgtagaccgacttcaggggcctgtcttccagcggagtgcctctgtcctcctcgtagagaaactctgaccactctgagacgaaggcccgcgtccaggccaggacgaaggaggccacgtgggaggggtagcggtcgttgtccactagcgggtccaccttctccagggtgtgcaggcacatgtccccctcctccgcgtccagaaaagtgattggcttgtaggtgtaggacacgtgaccgggggttcccgacgggggggtataaaagggggtgggcgccctttcatcttcactctcttccgcatcgctgtctgcgagggccagctgctggggtaagtattccctctcgaaggcgggcatgacctcagcgctcaggttgtcagtttctaaaaatgaggaggatttgatgttcacctgtccggaggtgatacctttgagggtacctgggtccatctggtcagaaaacactatttttttgttgtcaagcttggtggcgaacgacccgtagagggcgttggagagcagcttggcgatggagcgcagggtctggtttttgtcgcggtcggctcgctccttggccgcgatgttgagttgcacgtactcgcgggccacgcacttccactcggggaagacggtggtgcgctcgtctgggattaggcgcaccctccagcctcggttgtgcagggtgaccatgtcgacgctggtggcgacctcgccgcgcaggcgctcgttggtccagcagaggcggccgcccttgcgcgagcagaaggggggtagggggtccagctggtcctcgtttggggggtccgcgtcgatggtgaagaccccggggagcaagcgcgggtcaaagtagtcgatcttgcaagcttgcatgtccagagcccgctgccattcgcgggcggcgagcgcgcgctcgtaggggttgaggggcgggccccagggcatggggtgggtgagcgcggaggcgtacatgccgcagatgtcatacacgtacaggggttccctgaggatgccgaggtaggtggggtagcagcgccccccgcggatgctggcgcgcacgtagtcatagagctcgtgggagggggccagcatgttgggcccgaggttggtgcgctgggggcgctcggcgcggaaggcgatctgcctgaagatggcatgggagttggaggagatggtgggccgctggaagacgttgaagcttgcttcttgcaagcccaccgagtccctgacgaaggaggcgtaggactcgcgcagcttgtgcaccagctcggcggtgacctggacgtcgagcgcgcagtagtcgagggtctcgcggatgatgtcatacttatcctcccccttctttttccacagctcgcggttgaggacgaactcttcgcggtctttccagtactcttggaggggaaacccgtccgtgtccgaacggtaagagcctagcatgtagaactggttgacggcctggtaggggcaacagcccttctccacgggcagcgcgtaggcctgcgccgccttgcggagggaggtgtgggtgagggcgaaagtgtccctgaccatgactttgaggtattgatgtttgaagtctgtgtcatcgcagccgccctgttcccacagggtgtagtccgtgcgctttttggagcgcgggttgggcagggagaaggtgaggtcattgaagaggatcttccccgctcgaggcatgaagtttctggtgatgcgaaagggccctgggaccgaggagcggttgttgatgacctgggcggccaggacgatctcgtcaaagccgtttatgttgtggcccacgatgtagagctccaaaaagcggggctggcccttgatggaggggagctttttgagttcctcgtaggtgagctcctcgggcgattccaggccgtgctcctccagggcccagtcttgcaagtgagggttggccgccaggaaggatcgccagaggtcgcgggccatgagggtctgcaggcggtcgcggaaggttctgaactgtcgccccacggccatcttttcgggggtgatgcagtagaaggtgagggggtctttctcccaggggtcccatctgagctctcgggcgaggtcgcgcgcggcggcgaccagagcctcgtcgccccccagtttcatgaccagcatgaagggcacgagctgcttgccaaaggctcccatccaagtgtaggtctctacatcgtaggtgacaaagaggcgctccgtgcgaggatgagagccgatcgggaagaactggatctcccgccaccagttggaggattggctgttgatgtggtgaaagtagaagtcccgtctgcgggccgagcactcgtgctggcttttgtaaaagcgaccgcagtactggcagcgctgcacgggttgtatatcttgcacgaggtgaacctggcgacctctgacgaggaagcgcagcgggaatctaagtcccccgcctggggtcccgtgtggctggtggtcttctactttggttgtctggccgccagcatctgtctcctggagggcgatggtggagcagaccaccacgccgcgagagccgcaggtccagatctcggcgctcggcgggcggagtttgatgacgacatcgcgcacattggagctgtccatggtctccagctcccgcggcggcaggtcagctgggagttcctggaggttcacctcgcagagacgggtcaaggcgcgggcagtgttgagatggtatctgatttcaaggggcgtgttggcggcggagtcgatggcttgcaggaggccgcagccccggggggccacgatggttccccgcggggcgcgaggggaggcggaagctgggggtgtgttcagaagcggtgacgcgggcgggcccccggaggtagggggggttccggccccacaggcatgggcggcaggggcacgtcttcgccgcgcgcgggcaggggctggtgctggctccgaagagcgcttgcgtgcgcgacgacgcgacggttggtgtcctgtatctgacgcctctgagtgaagaccacgggtcccgtgaccttgaacctgaaagagagttcgacagaatcaatctcggcatcgttgacagcggcctggcgcaggatctcctgcacgtcgcccgagttgtcctggtaggcgatctctgccatgaactgctcgatctcttcttcctggagatctcctcgtccggcgcgctccacggtggccgccaggtcgttggagatgcgacccatgagctgtgagaaggcgttgagcccgccctcgttccagacccggctgtagaccacgcccccctcggcgtcgcgagcgcgcatgaccacctgggccaggttgagctccacgtgtcgcgtgaagacggcgtagttgcgcaggcgctggaaaaggtagttcagggtggtggcggtgtgctcggcgacgaagaagtacatgacccagcgccgcaacgtggattcattgatgtcccccaaggcctccaggcgctccatggcctcgtagaagtccacggcgaagttgaaaaactgggagttgcgagcggacacggtcaactcctcctccagaagacggatgagctcggcgacagtgttgcgcacctcgcgctcgaaggccacggggggcgcttcttcctcttccacctcttcttccatgatcgcttcttcttcttcctcagccgggacgggagggggcggcggcggcgggggaggggcgcggcggcggcggcggcgcaccgggaggcggtcgatgaagcgctcgatcatctccccccgcatgcggcgcatggtctcggtgacggcgcggccgttctcccgggggcgcagctcgaagacgccgcctctcatctcgccgcggggcgagcggccgtgaggtagcgagacggcgctgactatgcatcttaacaattgctgtgtaggtacaccgccgagggacctgattgagtccagatccaccggatccgaaaacctttggaggaaagcgtctatccagtcgcagtcgcaaggtaggctgagcaccgtggcgggcgggggcgggtctggagagttcctggcggagatgctgctgatgatgtaattaaagtaggcggtcttgagaaggcggatggtggacaggagcaccatgtctttgggtccggcctgttggatgcggaggcggtcggccatgccccaggcctcgttctgacaccggcgcaggtctttgtagtagtcttgcatgagtctttccaccggcacctcttctccttcctcttctccatctcgccggtggtttctcgcgccgcccatgcgcgtgaccccaaagcccctgagcggctgcagcagggccaggtcggcgaccacgcgctcggccaagatggcctgctgcacctgagtgagggtcctctcgaagtcatccatgtccacgaagcggtggtaggcgcccgtgttgatggtgtaggtgcagttggccatgacggaccagttgacggtctggtgtcccggctgcgagagctccgtgtaccgcaggcgcgagaaggcgcgggaatcgaacacgtagtcgttgcaagtccgcaccagatactggtagcccaccaggaagtgcggcggaggttggcgatagaggggccagcgctgggtggcgggggcgccgggcgccaggtcttccagcatgaggcggtggtatccgtagatgtacctggacatccaggtgatgccggcggcggtggtggtggcgcgcgcgtagtcgcggacccggttccagatgtttcgcaggggcgagaagtgttccatggtcggcacgctctggccggtgaggcgcgcgcagtcgttgacgctctatacacacacaaaaacgaaagcgtttacagggctttcgttctgtagcctggaggaaagtaaatgggttgggttgcggtgtgccccggttcgagaccaagctgagctcggccggctgaagccgcagctaacgtggtattggcagtcccgtctcgacccaggccctgtatcctccaggatacggtcgagagcccttttgctttcttggccaagcgcccgtggcgcgatctgggatagatggtcgcgatgagaggacaaaagcggctcgcttccgtagtctggagaaacaatcgccagggttgcgttgcggcgtaccccggttcgagcccctatggcggcttgaatcggccggaaccgcggctaacgagggccgtggcagccccgtcctcaggaccccgccagccgacttctccagttacgggagcgagccccttttgttttttattttttagatgcatcccgtgctgcggcagatgcgcccctcgccccggcccgatcagcagcagcaacagcaggcatgcagacccccctctcccctttccgccccggtcaccacggccgcggcggccgtgtcgggcgcggggggcgcgctggagtcagatgagccaccgcggcggcgacctaggcagtatctggacttggaagagggcgagggactggcgcggctgggggcgaactctccagagcgccacccgcgggtgcagttgaaaagggacgcgcgcgaggcgtacctgccgcggcagaacctgtttcgcgaccgcgggggcgaggagcccgaggagatgcgagactgcaggttccaagcggggcgcgagctgcggcgcgggctggacagacagcgcctgctgcgcgaggaggactttgagcccgacacgcagacgggcatcagccccgcgcgcgcgcacgtagccgcggccgacctggtgaccgcctacgagcagacggtaaaccaggagcgcaacttccaaaagagcttcaacaaccacgtgcgcacgctggtggcgcgcgaggaggtgaccctgggtctcatgcatctgtgggacctggtggaggcgatcgtgcagaaccccagcagcaagcccctgaccgcgcagctgttcctggtggtgcagcacagcagggacaacgaggccttcagggaggcgctgctgaacatcaccgagccggaggggcgctggctcctggacctgataaacatcctgcagagcatagtggtgcaggagcgcagcctgagcctggccgagaaggtggcggccatcaactactctatgctgagcctgggcaagttctacgcccgcaagatctacaagaccccctacgtgcccatagacaaggaggtgaagatagacagcttctacatgcgcatggcgctgaaggtgctgaccctgagcgacgacctgggagtgtaccgcaacgagcgcatccacaaggccgtgagcgccagccggcggcgcgagctgagcgaccgcgagctgatgcacagtctgcagcgcgcgctgaccggcgcgggcgagggcgacagggaggtcgagtcctacttcgacatgggggccgacctgcactggcagccgagccgccgcgccctggaggcggcgggggcgtacggcggccccctggcggccgatgaccaggaagaggaggactatgagctagaggagggcgagtacctggaggactgacctggctggtggtgttttggtatagatgcaagatccgaacgtggcggacccggcggtccgggcggcgctgcaaagccagccgtccggcattaactcctctgacgactgggccgcggccatgggtcgcatcatggccctgaccgcgcgcaaccccgaggctttcaggcagcagcctcaggccaaccggctggcggccatcttggaagcggtagtgcccgcgcgctccaaccccacccacgagaaggtgctggccatagtcaacgcgctggcggagagcagggccatccgcgcggacgaggccggactggtgtacgatgcgctgctgcagcgggtggcgcggtacaacagcggcaacgtgcagaccaacctggaccgcctggtgacggacgtgcgcgaggccgtggcgcagcgcgagcgcttgcatcaggacggtaacctgggctcgctggtggcgctaaacgccttcctcagcacccagccggccaacgtaccgcgggggcaggaggactacaccaactttttgagcgcgctgcggctgatggtgaccgaggtccctcagagcgaggtgtaccagtcggggcccgactacttcttccagaccagcagacagggcttgcaaaccgtgaacctgagccaggctttcaagaacctgcgggggctgtggggagtgaaggcgcccaccggcgaccgggctacggtgtccagcctgctaacccccaactcgcgcctgctgctgctgctgatcgcgcccttcacggacagcgggagcgtctcgcgggagacctatctgggccacctgctgacgctgtaccgcgaggccatcgggcaggcgcaggtggacgagcacaccttccaagagatcaccagcgtgagccacgcgctggggcaggaggacacgggcagcctgcaggcgaccctgaactacctgctgaccaacaggcggcagaagattcccacgctgcacagcctgacccaggaggaggagcgcatcttgcgctacgtgcagcagagcgtgagcctgaacctgatgcgcgacggcgtgacgcccagcgtggcgctggacatgaccgcgcgcaacatggaaccgggcatgtacgcctcccaccggccgtttatcaaccgcctgatggactacttgcatcgggcggcggccgtgaaccccgagtacttcactaatgccattctgaatccccactggatgccccctccgggtttctacaacggggactttgaggtgcccgaggtcaacgacgggttcctctgggatgacatggatgacagtgtgttctcacccaacccgctgcgcgccgcgtctctgcgattgaaggagggctctgacagggaaggaccgaggagtctggcctcctccctggctctgggagcggtgggcgccacgggcgcggcggcgcggggcagtagccccttccccagcctggcagactctctgaacagcgggcgggtgagcaggccccgcttgctaggcgaggaggagtatctgaacaactccctgctgcagcccgcgagggacaagaacgctcagcggcagcagtttcccaacaatgggatagagagcctggtggacaagatgtccagatggaagacgtatgcgcaggagtacaaggagtgggaggaccgccagccgcggcccttgccgccccctaggcagcgctggcagcggcgcgcgtccaaccgccgctggaggcaggggcccgaggacgatgatgactctgcagatgacagcagcgtgttggacctgggcgggagcgggaaccccttttcgcacctgcgcccacgcctgggcaagatgttttaaaagaaaaaaaaaataaaactcaccaaggccatggcgacgagcgttggttttttgttcccttccttagtatgcggcgcgcggcgatgttcgaggaggggcctcccccctcttacgagagcgcgatggggatttctcctgcggcgcccctgcagcctccctacgtgcctcctcggtacctgcaacctacaggggggagaaatagcatctgttactctgagctgcagcccctgtacgataccaccagactgtacctggtggacaacaagtccgcggacgtggcctccctgaactaccagaacgaccacagcgattttttgaccacggtgatccaaaacaacgacttcaccccaaccgaggccagcacccagaccataaacctggataacaggtcgaactggggcggcgacctgaagaccatcttgcacaccaacatgcccaacgtgaacgagttcatgttcaccaactcttttaaggcgcgggtgatggtggcgcgcgagcagggggaggcgaagtacgagtgggtggacttcacgctgcccgagggcaactactcagagaccatgactctcgacctgatgaacaatgcgatcgtggaacactatctgaaagtgggcaggcagaacggggtgaaggaaagcgatatcggggtcaagtttgacaccagaaacttccgtctgggctgggaccccgtgaccgggctggtcatgccgggggtctacaccaacgaggcctttcatcccgacatagtgcttctgcccggctgtggggtggacttcacccagagccggctgagcaacctgctgggcattcgcaagcggcagcctttccaggagggtttcaagatcacctatgaggatctgaaggggggcaacattcccgcgctccttgatctggacgcctacgaggagagcttgaaacccgaggagagcgctggcgacagcggcgagagtggcgaggagcaagccggcggcggtggcggcgcgtcggtagaaaacgaaagtacgcccgcagtggcggcggacgctgcggaggtcgagccggaggccatgcagcaggacgcagaggagggcgcacaggagggcgcgcagaaggacatgaacgatggggagatcaggggagacacattcgccacccggggcgaagaaaaagaggcagaggcggcggcggcggcgacggcggaggccgaaaccgaggttgaggcagaggcagagcccgagaccgaagttatggaagacatgaatgatggagaacgtaggggcgacacgttcgccacccggggcgaagagaaggcggcggaggcagaagccgcggctgaggaggcggctgcggctgcggccaagactgaggctgcggctaaggctgaggtcgaagccaatgttgcggttgaggctcaggctgaggaggaggcggcggctgaagcagttaaggaaaaggcccaggcagagcaggaagagaaaaaacctgtcattcaacctctaaaagaagatagcaaaaagcgcagttacaacgtcatcgagggcagcacctttacccagtaccgcagctggtacctggcgtacaactacggcgacccggtcaagggggtgcgctcgtggaccctgctctgcacgccggacgtcacctgcggctccgagcagatgtactggtcgctgccgaacatgatgcaagacccggtgaccttccgctccacgcggcaggttagcaacttcccggtggtgggcgccgaactgctgcccgtgcactccaagagtttttacaacgagcaggccgtctactcccagctgatccgccaggccacctctctgacccacgtgttcaatcgctttcccgagaaccagattttggcgcgcccgccggcccccaccatcaccaccgtgagtgaaaacgttcctgccctcacagatcacgggacgctaccgctgcgcaacagcatctcaggagtccagcgagtgaccattactgacgccagacgccggacctgcccctacgtttacaaggccttgggcatagtctcgccgcgcgtcctctccagtcgcactttttaaaacacatctacccacacgttccaaaatcatgtccgtactcatctcacccagcaacaacaccggctgggggctgcgcgcgcccagcaagatgtttggaggggcgaggaagcgctccgaccagcaccctgtgcgcgtgcgcggccactaccgcgcgccctggggagcgcacaagcgcgggcgcacagggcgcaccactgtggacgacgtcattgactccgtagtggagcaagcgcgccactacacacccggcgcgccgaccgcccccgccgtgtccaccgtggaccaggcgatcgaaagcgtggtacagggcgcgcggcactatgccaaccttaaaagtcgccgccgccgcgtggcccgccgccatcgccggagaccccgggccaccgccgccgcgcgccttactaaggctctgctcaggcgcgccaggcgaactggccaccgggccgccatgagggccgcacggcgggctgccgctgccgcaagcgtcgtggccccgcgggcacgaaggcgcgcggccgctgccgccgccgccgccatttccagcttggcctcgacgcggcgcggtaacatatactgggtgcgcgactcggtaaccggcacgcgggtacccgtgcgctttcgccccccgcggaattagcacaagacaacatacacactgagtctcctgctgttgtgtatcccagcggcgaccgtcagcagcggcgacatgtccaagcgcaaaattaaagaagagatgctccaggtcatcgcgccggagatctatgggcccccgaagaaggaggaggatgattacaagccccgcaagctaaagcgggtcaaaaagaaaaagaaagatgatgatgacgaggcggtggagtttgtccgccgcatggcacccaggcgccccgtgcagtggaagggccggcgcgtgcagcgcgttttgcgccccggcaccgcggtggtcttcacgcccggcgagcgctccacgcgcactttcaagcgggtgtacgatgaggtgtacggcgacgaggacctgttggagcaggccaaccagcgctttggggagtttgcatatgggaaacggccccgcgagagtctaaaagaggacctgctggcgctaccgctggacgagggcaatcccaccccgagtctgaagccggtaaccctgcaacaggtgctgcctttgagcgcgcccagcgagcataagcgagggttgaagcgcgaaggcggggacctggcgcccaccgtgcagttgatggtgcccaagcggcagaagctggaggacgtgctggagaaaatgaaagtagagcccgggatccagcccgagatcaaggtccgccccatcaagcaggtggcgcccggcgtgggagtccagaccgtggacgttaggattcccacggaggagatggaaacccaaaccgccactccctcttcggcggccagcgccaccaccggcaccgcttcggtagaggtgcagacggacccctggctacccgccaccgctgttgccgccgccgccccccgttcgcgcgggcgcaagagaaattatccagcggccagcgcgctcatgccccagtacgcactgcatccatccatcgtgcccacccccggctaccgcgggtactcgtaccgcccgcgcagatcagccggcactcgcggccgccgccgccgtgcgaccacaaccagccgccgccgtcgccgccgccgccagccagtgctgacccccgtgtctgtaaggaaggtggctcgctcggggagcacgctggtggtgcccagagcgcgctaccaccccagcatcgtttaaagccggtctctgtatggttcttgcagatatggccctcacttgtcgcctccgcttcccggtgccgggataccgaggaagaactcaccgccgcagaggcatggcgggcagcggtctccgcggcggccgtcgccatcgccggcgcgcaaaaagcaggcgcatgcgcggcggtgtgctgcctctgctaatcccgctaatcgccgcggcgatcggtgccgtacccgggatcgcctccgtggccctgcaggcgtcccagaaacgttgactcttgcaaccttgcaagcttgcattttttggaggaaaaataaaaaaaagtctagactctcacgctcgcttggtcctgtgactattttgtagaaaaaaagatggaagacatcaactttgcgtcgctggccccgcgtcacggctcgcgcccgttcatgggagactggacagatatcggcaccagcaatatgagcggtggcgccttcagctggggcagtctgtggagcggccttaaaaattttggttccaccattaagaactatggcaacaaagcgtggaacagcagcacgggccagatgctgagagacaagttgaaagagcagaacttccaggagaaggtggcgcagggcctggcctctggcatcagcggggtggtggacatagctaaccaggccgtgcagaaaaagataaacagtcatctggacccccgtcctcaggtggaggaaatgcctccagcgatggagacggtgtctcccgagggcaaaggcgaaaagcgcccgcggcccgacagagaagagaccctggtgtcacacaccgaggagccgccctcttacgaggaggcagtcaaggccggcctgcccaccactcgccccatagcccccatggccaccggtgtggtgggccacaggcaacacactcccgcaacactagatctgcccccgccgtccgagccgccgcgccagccaaaggcggcgacggtgcccgctccctccacttccgccgccaacagagtgcccctgcgccgcgccgcgagcggcccccgggcctcgcgagttagcggcaactggcagagcacactgaacagcatcgtgggcctgggagtgaggagtgtgaagcgccgccgttgctactgaatgagcaagctagctaacgtgttgtatgtgtgtatgcgtcctatgtcgccgccagaggagctgttgagccgccggcgccgtctgcactccagcgaatttcaagatggcgaccccatcgatgatgcctcagtggtcgtacatgcacatctcgggccaggacgcttcggagtacctgagccccgggctggtgcagttcgcccgcgccacagacacctacttcaacatgagtaacaagttcaggaaccccactgtggcgcccacccacgatgtgaccacggaccggtcgcagcgcctgacgctgcggttcatccccgtggatcgggaggacaccgcctactcttacaaggcgcggttcacgctggccgtgggcgacaaccgcgtgctggacatggcctccacttactttgacatcaggggggtgctggacaggggccccaccttcaagccctactcgggtactgcctacaactccctggcccccaagggcgctcccaattcttgcgagtgggaacaagatgaaccagctcaggcagcaatagctgaagatgaagaagaacttgaagaagaacaagctcaggacgaacaggcgcccactaagaaaacccatgtatacgcccaggcacctctttctggtgaaaaaattactaaggatggtttgcaaataggtgtggatgccacacaggcgggagataaccctatatatgctgataaaacattccaacccgaacctcagataggtgagtctcagtggaacgaggctgatgccacagtagcaggaggcagagtcttaaaaaagaccacccctatgagaccttgctatggatcctatgccaaacctactaatgccaatggcggtcaagggatcatggtggccaatgatcagggagcgcttgaatctaaagttgagatgcaatttttctccaccacaacgtctcttaatgtaagggaaggtgaaaacaatcttcagccaaaagtagtgctatacagcgaagatgttaacttggaatcccctgacactcatttgtcttacaaacctaaaaaggatgacaccaactctaaaatcatgttgggtcagcaagccatgcccaacagacccaacctcattgcttttagggacaactttattggacttatgtactacaacagcacaggcaacatgggagtgctggcaggacaggcctcccagctaaacgctgtggtagacttgcaagacagaaacacagagctgtcataccaactgatgcttgattccattggagacagatcaagatacttttccatgtggaaccaggcagtggacagctatgacccagatgtcagaatcattgaaaaccatggggttgaagatgagctgcccaactattgctttcccctgggcggtattggaattacagacacataccagtgcataaaaccaaccgcagctgctaataacactacatggtctaaggatgaagaatttagtgatcgcaatgaaataggggtgggaaacaacttcgccatggagatcaacatccaggccaacctctggaggaacttcctctatgcgaacgtggggctctacctgccagacaagctcaagtacaaccccaccaacgtggacatctctgacaaccccaacacctatgactacatgaacaagcgtgtggtggctcccggcctggtggactgctttgtcaatgtgggagccaggtggtccctggactacatggacaacgtcaaccccttcaaccaccaccgcaatgcgggtctgcgctaccgctccatgatcctgggcaacgggcgctacgtgcccttccacattcaggtgccccagaagttctttgccatcaagaacctcctcctcctgccgggctcctacacttacgagtggaacttcaggaaggatgtcaacatggtcctgcagagctctctgggcaatgaccttagggtggacggggccagcatcaagtttgacagcgtcaccctctatgctaccttcttccccatggctcacaacaccgcctccacgctcgaggccatgctgaggaacgacaccaacgaccagtccttcaatgactacctctctggggccaacatgctctaccccatccccgccaaggccaccaacgtgcccatctccattccctctcgcaactgggccgccttcagaggctgggcctttacccgccttaagaccaaggaaaccccctccctgggctcgggttttgacccctactttgtctactcgggatccatcccctacctggatggcaccttctacctcaaccacacttttaagaagatatccatcatgtatgactcctccgtcagctggccgggcaatgaccgcctgctcacccccaatgagttcgaggtcaagcgcgccgtggacggcgagggctacaacgtggcccagtgcaacatgaccaaggactggttcctggtgcagatgctggccaactacaacataggctaccagggcttctacatcccagagagctacaaggacaggatgtactccttcttcagaaatttccaacccatgagcaggcaggtggtggacgagaccaaatacaaggactatcaggccattggcatcactcaccagcacaacaactcgggattcgtgggctacctggctcccaccatgcgcgaggggcaggcctaccccgccaacttcccctacccgttgataggcaaaaccgcggtcgacagcgtcacccagaaaaagttcctctgcgaccgcaccctctggcgcatccccttctctagcaacttcatgtccatgggtgcgctcacggacctgggccagaacctgctctatgccaactccgcccatgcgctggacatgacttttgaggtggaccccatggacgagcccacccttctctatattgtgtttgaagtgttcgacgtggtcagagtgcaccagccgcaccgcggtgtcatcgagaccgtgtacctgcgcacgcccttctcggccggcaacgccaccacctaaggagacagcgccgccgcctgcatgacgggttccaccgagcaagagctcagggccatcgccagagacctgggatgcggaccctattttttgggcacctatgacaaacgcttcccgggcttcatctcccgagacaagctcgcctgcgccatcgtcaacacggccgcgcgcgagaccgggggcgtgcactggctggcctttggctgggacccgcgctccaaaacctgctacctcttcgacccctttggcttctccgatcagcgcctcagacagatctatgagtttgagtacgaggggctgctgcgccgcagcgcgcttgcctcctcgcccgaccgctgcatcacccttgagaagtccaccgagaccgtgcaggggccccactcggccgcctgcggtctcttctgctgcatgtttttgcacgcctttgtgcgctggccccagagtcccatggatcgcaaccccaccatgaacttgctcaagggagtgcccaacgccatgctccagagcccccaggtccagcccaccctgcgccacaaccaggaacagctctaccgcttcctggagcgccactccccctacttccgcagtcacagcgcgcacatccggggggccacctctttctgccacttgcaagaaaacatgcaagacggaaaatgatgtacagctcgctttttaataaatgtaaagactgtgcactttatttatacacgggctctttctggttatttattcaacaccgccgtcgccatctagaaatcgaaagggttctgccgcgcgtcgccgtgcgccacgggcagagacacgttgcgatactggaagcggctcgcccacttaaactcgggcaccaccatgcggggcagtggttcctcggggaagttctcgccccacagggtgcgggtcagctgcagcgcgctcaggaggtcgggagccgagatcttgaagtcgcagttggggccggaaccctgcgcgcgcgagttgcggtacacggggttgcagcactggaacaccagcagggccggattatgcacgctggccagcaggctctcgtcgctgatcatgtcgctgtccagatcctccgcgttgctcagggcgaacggggtcatcttgcagacctgcctgcccaggaaaggcggcagcccgggcttgccgttgcagtcgcagcgcaggggcatcagcaggtgcccgcggcccgactgcgcctgcgggtacagcgcgcgcatgaaggcttcgatctgcctgaaagccacctgcgtcttggctccctccgaaaagaacatcccacaggacttgctggagaactggttcgcgggacagctggcatcgtgcaggcagcagcgcgcgtcggtgttggcgatctgcaccacgttgcgaccccaccggttcttcactatcttggccttggaagcctgctccttcagcgcgcgctggccgttctcgctggtcacatccatctctatcacctgctccttgttgatcatgtttgtaccgtgcagacacttcaggtcgccctccgtctgggtgcagcggtgctcccacagcgcgcaaccggtgggctcccaatttttgtgggtcacccccgcgtaggcctgcaggtaggcctgcaagaagcgccccatcatggccacaaaggtcttctggctcgtaaaggtcagctgcaggccgcgatgctcttcgttcagccaggtcttgcagatggcggccagcgcctcggtctgctcgggcagcatcctaaaatttgtcttcaggtcgttatccacgtggtacttgtccatcatggcgcgcgccgcctccatgcccttctcccaggcggacaccatgggcaggcttagggggtttatcacttccaccggcgaggacaccgtactttcgatttcttcttcctccccctcttcccggcgcgcgcccacgctgctgcgcgctctcaccgcctgcaccaaggggtcgtcttcaggcaagcgccgcaccgagcgcttgccgcccttgacctgcttaatcagcaccggcgggttgctgaagcccaccatggtcagcgccgcctgctcttcttcgtcttcgctgtctaccactatctctggggaagggcttctccgctctgcggcggcgcgcttcttttttttcttgggagcggccgtgatggagtccgccacggcgacggaggtcgagggcgtggggctgggggtgcgcggtaccagggcctcgtcgccctcggactcttcctctgactccaggcggcggcggagtcgcttctttgggggcgcgcgcgtcagcggcggcggagacggggacggggacggggacgggacgccctccacagggggtggtcttcgcgcagacccgcggccgcgctcgggggtcttctcgagctggtcttggtcccgactggccattgtatcctcctcctcctaggcagagagacataaggagtctatcatgcaagtcgagaaggaggagagcttaaccaccccctctgagaccgccgatgcgcccgccgtcgccgtcgcccccgctgccgccgacgcgcccgccacaccgagcgacacccccgcggacccccccgccgacgcacccctgttcgaggaagcggccgtggagcaggacccgggctttgtctcggcagaggaggatttgcgagaggaggaggataaggagaagaagccctcagtgccaaaagatgataaagagcaagacgagcacgacgcagatgcacaccagggtgaagtcgggcggggggacggagggcatgacggcgccgactacctagacgaagggaacgacgtgctcttgaagcacctgcatcgtcagtgcgccattgtttgcgacgctctgcaggagcgcagcgaagtgcccctcagcgtggcggaggtcagccacgcctacgagctcagcctcttctccccccgggtgcccccccgccgccgcgaaaacggcacatgcgagcccaacccgcgcctcaacttctaccccgcctttgtggtacccgaggtcctggccacctatcacatcttctttcaaaattgcaagatccccctctcgtgccgcgccaaccgtagccgcgccgataagatgctggccctgcgccagggcgaccacatacctgatatcgccgctttggaagatgtaccaaagatcttcgagggtctgggtcgcaacgagaagcgggcagcaaactctctgcaacaggaaaacagcgaaaatgagagtcacaccggggtactggtggagctcgagggcgacaacgcccgcctggcggtggtcaagcgcagcatcgaggtcacccactttgcctaccccgcgctaaacctgccccccaaagtcatgaacgcggccatggacgggctgatcatgcgccgcggccggcccctcgctccagatgcaaacttgcatgaggagaccgaggacggccagcccgtggtcagcgacgagcagctggcgcgctggctggagaccgcggaccccgccgaactggaggagcggcgcaagatgatgatggccgtggtgctggtcaccgtagagctggagtgtctgcagcgcttcttcggcgaccccgagatgcagagaaaggtcgaggagaccctgcactacaccttccgccagggctacgtgcgccaggcttgcaagatctccaacgtggagctcagcaacctggtgtcctacctgggcatcttgcatgagaaccgcctcgggcagagcgtgctgcactccaccctgcgcggggaggcgcgccgcgactacgtgcgcgactgcgtttacctcttcctctgctacacctggcagacggccatgggggtctggcagcagtgcctggaggagcgcaacctcaaggagctggagaagctcctgcagcgcgcgctcaaagatctctggacgggctacaacgagcgctcggtggccgccgcgctggccgacctcatcttccccgagcgcctgctcaaaaccctccagcaggggctgcccgacttcaccagccaaagcatgttgcaaaacttcaggaactttatcctggagcgttctggcatcctacccgccacctgctgcgccctgcccagcgactttgtccccctcgtgtaccgcgagtgccccccgccgctgtggggtcactgctacctgttccaactggccaactacctgtcctaccacgcggacctcatggaggactccagcggcgaggggctcatggagtgccactgccgctgcaacctctgcacgccccaccgctccctggtctgcaacacccaactgctcagcgagagtcagattatcggtaccttcgagctacagggtccgtcctcctcagacgagaagtccgcggctccggggctaaaactcactccggggctgtggacttccgcctacctgcgcaaatttgtacctgaagactaccacgcccacgagatcaggttttacgaagaccaatcccgcccgcccaaggcggagctgaccgcctgcgtcatcacccagggcgagatcctaggccaattgcaagccatccaaaaagcccgccaagactttttgctgaagaagggtcggggggtgtatctggacccccagtcgggtgaggagctcaacccggttcccccgctgccgccgccgcgggaccttgcttcccaggataagcatcgccatggctcccagaaagaagcagcagcggccgccactgccgccaccccacatgctggaggaagaggaggaatactgggacagtcaggcagaggaggtttcggacgaggaggagccggagacggagatggaagagtgggaggaggacagcttagacgaggaggcttccgaagccgaagaggcagacgcaacaccgtcaccctcggccgcagccccctcgcaggcgcccccgaagtccgctcccagcatcagcagcaacagcagcgctataacctccgctcctccaccgccgcgacccacggccgaccgcagacccaaccgtagatgggacaccaccggaaccggggccggtaagtcctccgggagaggcaagcaagcgcagcgccaaggctaccgctcgtggcgcgctcacaagaacgccatagtcgcttgcttgcaagactgcggggggaacatctccttcgcccgccgcttcctgctcttccaccacggtgtggccttcccccgtaacgtcctgcattactaccgtcatctctacagcccctactgcggcggcagtgagccagagacggtcggcggcggcggcggcgcccgtttcggcgcctaggaagacccagggcaagacttcagccaagaaactcgcggcggccgcggcgaacgcggtcgcgggggccctgcgcctgacggtgaacgaacccctgtcgacccgcgaactgaggaaccgaatcttccccactctctatgccatcttccagcagagcagagggcaggatcaggaactgaaagtaaaaaacaggtctctgcgctccctcacccgcagctgtctgtatcacaagagcgaagaccagcttcggcgcacgctggaggacgctgaggcactcttcagcaaatactgcgcgctcactcttaaggactagctccgcgcccttctcgaatttaggcgggaacgcctacgtcatcgcagcgccgccgtcatgagcaaggacattcccacgccatacatgtggagctatcagccgcagatgggactcgcggcgggcgcctcccaagactactccacccgcatgaactggctcagtgccggcccacacatgatctcacaggttaatgatatccgcacccatcgaaaccaaatattggtggagcaggcggcaattaccaccacgccccgcaataatcccaaccccagggagtggcccgcgtccctggtgtatcaggaaattcccggccccaccaccgtactacttccgcgtgattcccaggccgaagtccaaatgactaactcaggggcacagctcgcgggcggctgtcgtcacagggtgcggcctcctcgccagggtataactcacctggagatccgaggcagaggtattcagctcaacgacgagtcggtgagctcctcgctcggtctcagacctgacgggaccttccagatagccggagccggccgatcttccttcacgccccgccaggcgtacctgactctgcaaagctcgtcctcggcgccgcgctcgggcggcatcgggactctccagttcgtgcaggagtttgtgccctcggtctacttcaaccccttctcgggctctcccggtcgctacccggaccagttcatctcgaactttgacgccgcgagggactcggtggacggctacgactgaatgtcgggtggacccggtgcagagcaacttcgcctgaagcacctcgaccactgccgccgccctcagtgctttgcccgctgtcagaccggtgagttccagtacttttccctgcccgactcgcacccggacggcccggcgcacggggtgcgctttttcatcccgagtcaggtgcgctctaccctaatcagggagtttaccgcccgtcccctactggcggagttggaaaaggggccttctatcctaaccattgcctgcatctgctctaaccctggattgcaccaagatctttgctgtcatttgtgtgctgagtataataaaggctgagatcagaatctactcgggctcctgtcgccatcctgtcaacgccaccgtccaagcccggcccgatcagcccgaggtgaacctcacctgcggtctgcaccggcgcctgaggaaatacctagcttggtactacaacagcactccctttgtggtttacaacagctttgaccaggacggggtctcactgagggataacctctcgaacctgagctactccatcaggaagaacagcaccctcgagctacttcctccttacctgcccgggacttaccagtgtgtcaccggtccctgcacccacacccacctgttgatcgtaaacgactctcttccgagaacagacctcaataactcctcttcgcagttccccagaacaggaggtgagctcaggaaaccccgggtaaagaagggtggacgagagttaacacttgtggggtttctggtgtatgtgacgctggtggtggctcttttgattaaggcttttccttccatgtctgaactctccctcttcttttatgaacaactcgactagtgctaacgggaccctacccaacgaatcgggattgaatatcggtaaccaggttgcagtttcacttttgattaccttcatagtcctcttcctgctagtgctgtcgcttctgtgcctgcggatcgggggctgctgcatccacgtttatatctggtgctggctgtttagaaggttcggagaccatcgcaggtagaataaacatgctgctgcttaccctctttgtcctggcgctggccgccagctgccaagccttttccgaggctgactttatagagccccagtgtaatgtgacttttaaagcccatgcacagcgttgtcatactataatcaaatgtgccaccgaacacgatgaataccttatccagtataaagataaatcacacaaagtggcacttgttgacatctggaaacccgaagaccctttggaatacaatgtgaccgttttccagggtgacctcttcaaaatttacaattacactttcccatttgaccagatgtgtgactttgtcatgtacatggaaaagcagcacaagctgtggcctccgactccccagggctgtgtggaaaatccaggctctttctgcatgatctctctctgtgtaactgtgctggcactaatactcacgcttttgtatatcagatttaaatcaaggcaaagcttcattgatgaaaagaaaatgccttaatcgctttcacgcttgattgctaacaccgggtttttatccgcagaatgattggaatcaccctactaatcacctccctccttgcgattgcccatgggttggaacgaatcgaagtccctgtgggggccaatgttaccctggtggggcctgtcggcaatgctacattaatgtgggaaaaatatactaaaaatcaatgggtctcttactgcactaacaaaaatagccacaagcccagagccatctgcgatgggcaaaatctaaccttgattgatgttcaattgctggatgcgggctactattatgggcagctgggtacaatgattaattactggagaccccacagagattacatgctccacgtagtaaagggtccccttagcagcccacccactaccacctctactacccccactaccaccactactcccaccaccagcactgccgcccagcctcctcatagcagaacaaccacttttatcaattccaagtcccactccccccacattgccggcgggccctccgcctcagactccgaaaccaccgagatctgcttctgcaaatgctctgacgccattgcccaggatttggaagatcacgaggaagatgagcatgacttcgcagatgcatgccaggcatcagagccagaagcgctgccggtggccctcaaacagtatgcagacccccacaccacccccgaccttcctccaccttcccagaagccaagtttcctgggggaaaatgaaactctgcctctctccatactcgctctgacatctgttgctatgttgaccgctctgctggtgcttctatgctctatatgctacctgatctgctgcagaaagaaaaaatctcacggccatgctcaccagcccctcatgcacttcccttaccctccagagctgggcgaccacaaactttaagtctgcagtaactatctgcccatcccttgtcagtcgacagcgatgagccccactaatctaacggcctctggacttacaacatcgtctcttaatgagaccaccgctcctcaagacctgtacgatggtgtctccgcgctggttaaccagtgggatcacctgggcatatggtggctcctcataggagcagtgaccctgtgcctaatcctggtctggatcatctgctgcatcaaaagcagaagacccaggcggcggcccatctacaggccctttgtcatcacacctgaagatgatgatgacaccacttccaggctgcagaggctaaagcagctactcttctcttttacagcatggtaaattgaatcatgcctcgcattttcatctacttgtctctccttccactttttctgggctcttctacattggccgctgtgtcccacatcgaggtagactgcctcacgcccttcacagtctacctgcttttcggctttgtcatctgcacctttgtctgcagcgttatcactgtagtgatctgcttcatacagtgcatcgactacgtctgcgtgcgggtggcttactttagacaccacccccagtatcgcaacagggacatagcggctctcctaagacttgtttaaaatcatggccaaattaactgtgattggtcttctgatcatctgctgcgtcctagccgcgattgggactcaagctcctaccaccaccagcgctcccagaaagagacatgtatcctgcagcttcaagcgtccctggaatataccccaatgctttactgatgaacctgaaatctctttggcttggtacttcagcgtcaccgcccttcttatcttctgcagtacggttattgcccttgccatctacccttcccttgacctgggctggaatgctgtcaactctatggaatatcccaccttcccagaaccagacctgccagacctggttgttctaaacgcgtttcctcctcctgctcccgttcaaaatcagtttcgccctccgtcccccacgcccactgaggtcagctactttaatctaacaggcggagatgactgaaaacctagacctagaaatggacggtctctgcagcgagcaacgcacactagagaggcgccggcaaaaagagctcgagcgtcttaaacaagagctccaagacgcggtggccatacaccagtgcaaaaaaggtgtcttctgtctggtaaaacaggccacgctcacctatgaaaaaacaggtgacacccaccgcctaggatacaagctgcccacacagcgccaaaagttcgccctcatgataggcgaacaacccatcaccgtgacccagcactccgtggagacagaaggctgcatacatgctccctgtaggggcgctgactgcctctacaccttgatcaaaaccctctgcggtctcagagaccttatccctttcaattaatcataactgtaatcaataaaaaatcacttacttgaaatctgatagcaagcctctgtccaattttttcagcaacacttccttcccctcctcccaactctggtactctaggcgcctcctagctgcaaacttcctccacagtctgaagggaatgtcagattcctcctcctgtccctccgcacccacgatcttcatgttgttgcagatgaaacgcgcgagatcgtctgacgagaccttcaaccccgtgtacccctacgataccgagatcgctccgacttctgtccctttccttacccctccctttgtgtcatccgcaggaatgcaagaaaatccagctggggtgctgtccctgcacttgtcagagccccttaccacccacaatggggccctgactctaaaaatggggggcggcctgaccctggacaaggaagggaatctcacttcccaaaacatcaccagtgtcgatccccctctcaaaaaaagcaagaacaacatcagccttcagaccgccgcacccctcgccgtcagctccggggccctaacactttttgccactccccccctagcggtcagtggtgacaaccttactgtgcagtctcaggcccctctcactttggaagactcaaaactaactctggccaccaaaggacccctaactgtgtccgaaggcaaacttgtcctagaaacagaggctcccctgcatgcaagtgacagcagcagcctgggccttagcgttacggccccacttagcattaacaatgacagcctaggactagatctgcaggcacccattgtctctcaaaatggaaaactggctctaaatgtagcaggccccctagctgtggccaatggcattaatgctttgacagtaggcacaggcaaaggtattggtctaaatgaaaccagcactcacttgcaagcaaagttggtcgcccccctaggctttgataccaatggcaacattaagctaagcgttgcaggaggcatgagactaaataatgacacacttatactagatgtaaactacccatttgaagctcaaggccaactaagtctaagagtgggccagggtccgctgtatgtagattctagcagccataacctgaccattagatgccttagaggattatacataacatcgtctaataaccaaaccggtctagaggccaacataaaactaacaaaaggccttgtctatgatggaaatgccatagcagtcaatgttggtcaaggattgcaatacagcactactgccacatcggaaggtgtgtatcctatacagtctaagataggtttgggaatggaatatgataccaacggagccatgatgacaaaactaggctctggactaagctttgacaattcaggagccattgtagtgggaaacaaaaatgatgacaggcttactctgtggactacaccagacccatctcctaactgtagaatttattctgaaaaagatactaaactaaccttggtgctgactaagtgtggcagccaaatcctaggcacagtatctgcccttgctgtcagaggcagccttgcgcccatcactaatgcatccagcatagtccaaatatttctaagatttgatgaaaatggactattgatgagcaactcatcgctagacggtgattactggaattacagaaatggggactccactaatagcacaccatatacaaatgcagtaggctttatgcctaatctagcagcctatcctaaaggtcaggctacagctgcaaaaagcagtattgtaagccaggtatacatggatggtgacactactaaacctataacactaaaaataaacttcaatggcattgatgaaacaacagaaaatacccctgttagtaaatattccatgacattctcatggagctggcccaccgcaagctacataggccacacttttgcaacaaactcttttactttctcctacatcgcccaagaataaagaaagcacagagatgcttgttttgatttcaaaattgtgtgcttttatttattttcagcttacagtatttccagtagtcattcgaataaagcttaatcaaactgcatgagaacccttccacatagcttaaattagcaccagtgcaaatggagaaaattcaacataccttttttatccagatatcagagaactctagtggtcagttttcccccaccctcccagctcacagaatacacagtcctttccccccggctggctttaaacaacactatctcattggtaacagacatattcttaggtgtaataatccacacggtctcttggcgggccaagcgctggtcggtgatgttaataaactccccaggcagctctttcaagttcacgtcgctgtccaactgctgaagcgctcgcggctccgactgcgcctctagcggaggcaacggcaacacccgatccttgatctataaaggagtagagtcataatcccccataagaatagggcggtgatgcagcaacaaggcgcgcagcaactcctgccgccgcctctccgtacgacaggaatgcaacggcgtggtggtctcctccgcgataatccgcaccgctcgcagcatcagcatcctcgtcctccgggcacagcagcgcatcctgatctcactgagatcggcgcagtaagtgcagcacaaaaccaagatgttatttaagatcccacagtgcaaagcactgtacccaaagctcatggcgggaaggacagcccccacgtgaccatcataccagatccttaggtaaatcaaatgacgacctctcataaacacgctggacatgtacatcacctccttgggcatgcgctgattcaccacctctcgataccacaagcatcgctgattaattaaagacccctcaagcaccatcctgaaccaggaagccagcacctgaccccccgccaggcactgcagggaccccggtgaattgcagtggcagtgaagactccagcgctcgtagccgtgaaccatagagccggtcattatatccacattggcacaacacaaacacactttcatacactttttcatgattagcagctcctctctagtcaggaccatatcccaaggaatcacccactcttgaatcaaggtaaatcccacacagcagggcaggcctctcacataactcacgttatgcatagtgagcgtgtcgcaatctggaaataccggatgatcttccatcaccgaagctcgcgtctccgtctcaaagggaggtaaacggtccctcgtgtagggacagtggcgggataatcgagatcgtgttgaacgtagagtcatgccaaagggaacagcggacgtactcatatttcctccagcagaaccaagtgcgcgcgtggcagctatccctgcgtcttctgtctcgccgcctgccccgctcggtgtagtagttgtaatacagccactccctcagaccgtcaaggcgctccctggcgtccggatctataacaacaccgtcctgcagcgccgccctgatgacatccaccaccgtagagtatgccaagcccagccaggaaatgcattcactttgacagcgagagataggaggagcgggaagagatggaagaaccatgatagtaaaagacttttattccaatcgatcctctacaatgtcaaagtgtagatctataagatgacactggtctcctccgctgagtcgatcaaaaataacagctaaaccacaaacaacacgattggtcaaatgctccacaagggcttgcagcataaaatcgcctcgaaagtccaccgcaagcataacatcaaagccaccgcccctatcatgatctataataaaaaccccacagctatccaccagacccataaagttttcatctctccatcgtgaaaaaatatttacaagctcctcctttaaatcacctccaaccaattgaaaaagttgagccaaaccgccctccaccttcattttcagcaagcgcatcatgattgcaaaaattcaggctcctgagacacctgtataagattgagaagcggaacgttaacgtcaatgtttcgctcgcgaagatcgcgcctcagtgcaagcatgatataatcccacaggtcggagcggatcagcgaggacatctccccgccaggaaccaactcaacggagcctatgctgattataatacgcatattcggggctatgctgaccagcacggcccccaaataggcgtactgcataggcggcgacaaaaagtgaacagtttgggttaaaaaatcaggcaaacagtcgcgcaaaaaagcaagaacatcataaccatgctcatgcaaatagatgcaagtaagctcaggaacgaccacagaaaaatgcacaatttttctctcaaacatgactgcgagccctgcaaaaaataaaaaagaaacattacacaagagtagcctgtcttacgatgggatagactactctaaccaacataagacgggccacaacatcgcccgcgtggccataaaaaaaattgtccgtgtgattaaaaagaagcacagatagctggccagtcatatccggagtcatcacgtgtgaacccgtgtagacccccgggttggacacatcggccaaacaaagaaagcggccaatgtacccaggaggaatcataacactaagacgaagatacaacagaataaccccatgagggggaataacaaagttagtaggtgaataaaaacgataaacacccgaaactccctcctgcgtaggcaaaatagcaccctccccttccaaaacaacatatagcgcttccacagcagccatgacaaaagactcaaaacactcaaaagactcagtcttaccaggaaaataaaagcactctcacagcaccagcactaatcagagtgtgaagagggccaagtgccgaacgagtatatataggaataaaaaatgacgtaaatgtgtaaaggtcagaaaacgcccagaaaaatacacagaccaacgcccgaaacgaaaacccgcgaaaaaatacccagaacttcctcaacaaccgccacttccggtttctcacggtacgtcacttccgcaagaaaagcaaaactacatttcccacatgtgtaaaaacgaaaccccgccccttgtaactgcccacaacttacatcatcaaaacataaactcctacgtcacccgccccgcctctccccgcccacctcattatcatattggccacaatccaaaataaggtatattat

SEQ ID NO: 24 - DNA, 37216 bp, Gorilla beringei beringei
ataatataccttattttggattgtggccaatatgataatgaggtgggcggggagaggcggggcgggtgacgtaggacgcgcgagtagggttgggaggtgtggcggaagtgtggcatttgcaagtgggaggagctcacatgcaagcttccgtcgcggaaaatgtgacgtttttgatgagcgccgcctacctccggaagtgccaattttcgcgcgcttttcaccggatatcgtagtaattttgggcgggaccatgtaagatttggccattttcgcgcgaaaagtgaaacggggaagtgaaaactgaataatagggcgttagtcatagcgcgtaatatttaccgagggccgagggactttgaccgattacgtggaggactcgcccaggtgttttttacgtgaatttccgcgttccgggtcaaagtctccgtttttattgtcaccgtcatttgacgcggagggtatttaaacccgctgcgctcctcaagaggccactcttgagtgccagcgagaagagttttctcctctgctccgcttcggtgatcgaaaaatgagacacatagcctgcactccgggtcttttgtccggtcgggcggcggccgagcttttggacgctttgatcaatgatgtcctaagcgatgattttccgtctactacccactttagcccacctactcttcacgaactgtacgatctggatgtactggtggatgtgaacgatcccaacgaggaggcggtttctgcgttttttcccgagtctgcgctgttggccgctcaggagggatttgacctacacactccgccgcctattttagagtctccgctgccggagcccagtggtataccttatatgcctgaactgcttcccgaagtggtagacctgacctgccacgagcctggctttccgcccagcgacgatgagggtgagccttttgttttagactttgctgagatacctgggcacggttgcaggtcttgtgcatatcatcagagggttaccggagaccccgaggttaagtgttcgctgtgctatatgaggatgacctcttcctttatctacagtaagtttttgtctaggtgggcttttgggtaggtgggttttgtgtcagaacaggtgtaaacgttgcttgtgttttttgtacctgtaggtccggtgtccgagccagacccggagcccgaccgcgatcccgagccggatcccgagcctcctcgcaggacaaggaaactaccttccattctgtgcaagtctcagacacctgtaaggaccagcgaggcagacagcaccgactctggcacttctacctctccccctgaaattcacccagtggttcctctgggtatacataaacctgttgctgttaaagtttgcgggcgacgccctgcagtacagtgcattgaggacttgcttcacgatcccgaggaacctttggacttgagccttaaacgccctaggcaataaaccccacctaagtaataaaccccacctaagtaataaaccctgccgcccttggttattgagatgacgcccaatgtttgcttttgaatgacttcatgtgtgtaataaaagtgagtgtgatcataggtctcttgtttgtctgggcggggcttaagggtatataagtctcttggggctaaacttggttacacttgaccccaatggaggcgtgggggtgcttggaggagtttgcggacgtgcgccgtttgctggacgagagctctagcaatacctatactatttggaggtatctgtggggctctactcaggccaagttggtttccagaattaagcaggattacaagtgcgattttgaagagctttttagttcctgcggtgagcttttgcaatccttgaatctgggccatcaggctattttccaggaaaaggttctctcgactttggatttttccactcccgggcgcaccgccgcttgtgtggcttttgtgtcttttgtgcaagataaatggagcgaggagacccacctgagtcacggctacgtactggatttcatggcgatggctctttggagggctcacaacaaatggaagattcagaaggaactgtacggttccgccctacgtcgtccacttctgtcgcgacaggggctgaggtttcccgaccatcggcagcatcagaatctggaagacgagtcggaggagcgagcggaggagaagatcagcttgagagccggcctggaccctcctcaggaggaatgaatctcccgcaggtggttgacctgtttccagaactgagacgggtcctgactatcagggaggatggtcagtttgtgaagaagtttaagagggatcggggtgagggagatgatgaggcggctagcaatttagcttttagtctgatgactcgccaccgaccggaatgtattacctatcagcagattaaggagagttgtgccaacgagctggatcttttgggtcagaagtatagcatagaacagcttaccacttactggcttcagcctggggatgattgggaagaggcgatcagggtgtatgcaaaggtggccctgcggcccgattgcaagtataagattactaagttggttaatattagaaactgctgctatatttctgggaacggggccgaagtggagatagatactcaggacagggtggcttttaggtgttgcatgataaacatgtggcccgggatactggggatggatggggtggtattcatgaatgtgaggtttacgggccccaactttaatggcacggtgttcatgggcaacaccaacttgctcctgcatggtgcgagtttctatgggtttaataacacctgtatagaggcctggaccgatgtaaaggttcgaggttgttccttttatagctgttggaaggcggtggtgtgtcgccctaaaagcaggggttctgtgaaaaaatgcttgtttgaaaggtgcaccttaggcatcctctctgagggcaactccagggtgcgccataatgtggcttcgaactgcggttgcttcatgcaagtgaagggggtgagcgttatcaagcataactcggtgtgtggaaactgcgaggatcgcgcctcccagatgctgacctgctttgatggcaactgtcacctgttgaagaccattcatataagcagccaccccagaaaggcctggcccgtgtttgagcataacatcttgacccgctgctccttgcatctgggggtcaggaggggtatgttcctgccttaccagtgtaactttagccacactaaaatcctgctggaacccgagtgcatgaccaaggtcagcctgaatggtgtgtttgatgtgactctgaaaatctggaaggtgctgaggtatgatgagaccaggaccaggtgccgaccctgcgagtgcggcggcaagcacatgagaaatcagcctgtgatgttggatgtgaccgaggagcttaggcctgaccatctggtgctggcctgcaccagggccgagtttgggtctagcgatgaggataccgattgaggtgggtaaggtgggcgtggctagaagggtggggcgtgtataaattgggggtctaagggtctctctgttttgtcttgcaacagccgccgccatgagcgacaccggcaacagctttgatggaagcatctttagcccctatctgacagtgcgcatgcctcactgggctggagtgcgtcagaatgtgatgggttccaacgtggatggacgccccgttctgccttcaaattcgtctacaatggcctacgcgaccgtgggaggaactccgctggacgccgcgacctccgccgccgcctccgccgccgccgcgaccgcgcgcagcatggctacggacctttacagctctttggtggcgagcggcgcggcctctcgcgcgtctgctcgggatgagaaactgaccgctctgctgcttaaactggaagacttgacccgggagctgggtcaactgacccagcaggtctccagcttgcgtgagagcagccttgcctccccctaatggcccataatataaataaaagccagtctgtttggattaagcaagtgtatgttctttatttaactctccgcgcgcggtaagcccgggaccagcggtctcggtcgtttagggtgcggtggattctttccaacacgtggtacaggtggctctggatgtttagatacatgggcatgagtccatccctggggtggaggtagcaccactgcagagcttcgtgctcgggggtggtgttgtatatgatccagtcgtagcaggagcgctgggcgtggtgctgaaaaatgtccttaagcaagaggcttatagctagggggaggcccttggtgtaagtgtttacaaatctgctcagttgggaggggtgcatccggggggatataatgtgcatcttggactggatttttaggttggctatgttcccacccagatcccttctgggattcatgttgtgcaggaccaccagcacggtatatccagtgcacttgggaaatttatcgtggagcttagacgggaatgcatggaagaacttggagacgcccttgtggcctcccagattttccatacattcgtccatgatgatggcaatgggcccgtgggaagctgcctgagcaaaaatgtttctgggatcgctcacatcgtagttatgttccagggtgaggtcatcataggacatctttacgaatcgggggcggagggtcccggactgggggatgatggtaccctcgggccccggggcgtagttcccctcacagatctgcatctcccaggctttcatttcagagggagggatcatatccacctgcggagcgatgaaaaacacagtttctggcgcaggggagattaactgggatgagagcaggtttctgagcagctgtgactttccacagccggtgggcccatatatcacgcctatcaccggctgcagctggtagttaagagagctgcagctgccgtcctcccggagcaggggggccacctcgttcagcatatccctgacgtggatgttctccctgaccaattccgccagaaggcgctcgccgcccagcgaaagcagctcttgcaaggaagcaaaatttttcagcggttttaggccgtcggccgtgggcatgtttttcagcgtctgggtcagcagttccagcctgtcccacagctcggtgatgtgctctacggcatctcgatccagcagatctcctcgtttcgcgggttggggcggctttcgctgtagggcaccagccgatgggcgtccagcggggccagagtcatgtccttccatgggcgcagggtcctcgtcagggtggtctgggtcacggtgaaggggtgcgctccgggttgggcgctggccagggtgcgcttgaggctggttctgctggtgctgaatcgctgccgctcttcgccctgcgcgtcggccaggtagcatttgaccatggtctcgtagtcgagaccctcggcggcgtgccccttggcgcggagctttcccttggaggtggcgccgcacgaggggcactgcaggctcttcagggcgtagagcttgggagcgagaaacacggactctggggagtaggcgtccgcgccgcaggaagcgcagaccgtctcgcattccaccagccaagtgagctccgggcggtcagggtcaaaaaccaggttgcccccatgctttttgatgcgtttcttacctcggctctccatgaggcggtgtcccttctcggtgacgaagaggctgtccgtgtccccgtagaccgacttcaggggcctgtcttccagcggagtgcctctgtcctcctcgtagagaaactctgaccactctgagacgaaggcccgcgtccaggccaggacgaaggaggccacgtgggaggggtagcggtcgttgtccactagcgggtccaccttctccagggtgtgcaggcacatgtccccctcctccgcgtccagaaaagtgattggcttgtaggtgtaggacacgtgaccgggggttcccgacgggggggtataaaagggggtgggcgccctttcatcttcactctcttccgcatcgctgtctgcgagggccagctgctggggtaagtattccctctcgaaggcgggcatgacctcagcgctcaggttgtcagtttctaaaaatgaggaggatttgatgttcacctgtccggaggtgatacctttgagggtacctgggtccatctggtcagaaaacactatttttttgttgtcaagcttggtggcgaacgacccgtagagggcgttggagagcagcttggcgatggagcgcagggtctggtttttgtcgcggtcggctcgctccttggccgcgatgttgagttgcacgtactcgcgggccacgcacttccactcggggaagacggtggtgcgctcgtctgggattaggcgcaccctccagcctcggttgtgcagggtgaccatgtcgacgctggtggcgacctcgccgcgcaggcgctcgttggtccagcagaggcggccgcccttgcgcgagcagaaggggggtagggggtccagctggtcctcgtttggggggtccgcgtcgatggtgaagaccccggggagcaagcgcgggtcaaagtagtcgatcttgcaagcttgcatgtccagagcccgctgccattcgcgggcggcgagcgcgcgctcgtaggggttgaggggcgggccccagggcatggggtgggtgagcgcggaggcgtacatgccgcagatgtcatacacgtacaggggttccctgaggatgccgaggtaggtggggtagcagcgccccccgcggatgctggcgcgcacgtagtcatagagctcgtgggagggggccagcatgttgggcccgaggttggtgcgctgggggcgctcggcgcggaaggcgatctgcctgaagatggcatgggagttggaggagatggtgggccgctggaagacgttgaagcttgcttcttgcaagcccaccgagtccctgacgaaggaggcgtaggactcgcgcagcttgtgcaccagctcggcggtgacctggacgtcgagcgcgcagtagtcgagggtctcgcggatgatgtcatacttatcctcccccttctttttccacagctcgcggttgaggacgaactcttcgcggtctttccagtactcttggaggggaaacccgtccgtgtccgaacggtaagagcctagcatgtagaactggttgacggcctggtaggggcaacagcccttctccacgggcagcgcgtaggcctgcgccgccttgcggagggaggtgtgggtgagggcgaaagtgtccctgaccatgactttgaggtattgatgtttgaagtctgtgtcatcgcagccgccctgttcccacagggtgtagtccgtgcgctttttggagcgcgggttgggcagggagaaggtgaggtcattgaagaggatcttccccgctcgaggcatgaagtttctggtgatgcgaaagggccctgggaccgaggagcggttgttgatgacctgggcggccaggacgatctcgtcaaagccgtttatgttgtggcccacgatgtagagctccaaaaagcggggctggcccttgatggaggggagctttttgagttcctcgtaggtgagctcctcgggcgattccaggccgtgctcctccagggcccagtcttgcaagtgagggttggccgccaggaaggatcgccagaggtcgcgggccatgagggtctgcaggcggtcgcggaaggttctgaactgtcgccccacggccatcttttcgggggtgatgcagtagaaggtgagggggtctttctcccaggggtcccatctgagctctcgggcgaggtcgcgcgcggcggcgaccagagcctcgtcgccccccagtttcatgaccagcatgaagggcacgagctgcttgccaaaggctcccatccaagtgtaggtctctacatcgtaggtgacaaagaggcgctccgtgcgaggatgagagccgatcgggaagaactggatctcccgccaccagttggaggattggctgttgatgtggtgaaagtagaagtcccgtctgcgggccgagcactcgtgctggcttttgtaaaagcgaccgcagtactggcagcgctgcacgggttgtatatcttgcacgaggtgaacctggcgacctctgacgaggaagcgcagcgggaatctaagtcccccgcctggggtcccgtgtggctggtggtcttctactttggttgtctggccgccagcatctgtctcctggagggcgatggtggagcagaccaccacgccgcgagagccgcaggtccagatctcggcgctcggcgggcggagtttgatgacgacatcgcgcacattggagctgtccatggtctccagctcccgcggcggcaggtcagctgggagttcctggaggttcacctcgcagagacgggtcaaggcgcgggcagtgttgagatggtatctgatttcaaggggcgtgttggcggcggagtcgatggcttgcaggaggccgcagccccggggggccacgatggttccccgcggggcgcgaggggaggcggaagctgggggtgtgttcagaagcggtgacgcgggcgggcccccggaggtagggggggttccggccccacaggcatgggcggcaggggcacgtcttcgccgcgcgcgggcaggggctggtgctggctccgaagagcgcttgcgtgcgcgacgacgcgacggttggtgtcctgtatctgacgcctctgagtgaagaccacgggtcccgtgaccttgaacctgaaagagagttcgacagaatcaatctcggcatcgttgacagcggcctggcgcaggatctcctgcacgtcgcccgagttgtcctggtaggcgatctctgccatgaactgctcgatctcttcttcctggagatctcctcgtccggcgcgctccacggtggccgccaggtcgttggagatgcgacccatgagctgtgagaaggcgttgagcccgccctcgttccagacccggctgtagaccacgcccccctcggcgtcgcgagcgcgcatgaccacctgggccaggttgagctccacgtgtcgcgtgaagacggcgtagttgcgcaggcgctggaaaaggtagttcagggtggtggcggtgtgctcggcgacgaagaagtacatgacccagcgccgcaacgtggattcattgatgtcccccaaggcctccaggcgctccatggcctcgtagaagtccacggcgaagttgaaaaactgggagttgcgagcggacacggtcaactcctcctccagaagacggatgagctcggcgacagtgttgcgcacctcgcgctcgaaggccacggggggcgcttcttcctcttccacctcttcttccatgatcgcttcttcttcttcctcagccgggacgggagggggcggcggcggcgggggaggggcgcggcggcggcggcggcgcaccgggaggcggtcgatgaagcgctcgatcatctccccccgcatgcggcgcatggtctcggtgacggcgcggccgttctcccgggggcgcagctcgaagacgccgcctctcatctcgccgcggggcgagcggccgtgaggtagcgagacggcgctgactatgcatcttaacaattgctgtgtaggtacaccgccgagggacctgattgagtccagatccaccggatccgaaaacctttggaggaaagcgtctatccagtcgcagtcgcaaggtaggctgagcaccgtggcgggcgggggcgggtctggagagttcctggcggagatgctgctgatgatgtaattaaagtaggcggtcttgagaaggcggatggtggacaggagcaccatgtctttgggtccggcctgttggatgcggaggcggtcggccatgccccaggcctcgttctgacaccggcgcaggtctttgtagtagtcttgcatgagtctttccaccggcacctcttctccttcctcttctccatctcgccggtggtttctcgcgccgcccatgcgcgtgaccccaaagcccctgagcggctgcagcagggccaggtcggcgaccacgcgctcggccaagatggcctgctgcacctgagtgagggtcctctcgaagtcatccatgtccacgaagcggtggtaggcgcccgtgttgatggtgtaggtgcagttggccatgacggaccagttgacggtctggtgtcccggctgcgagagctccgtgtaccgcaggcgcgagaaggcgcgggaatcgaacacgtagtcgttgcaagtccgcaccagatactggtagcccaccaggaagtgcggcggaggttggcgatagaggggccagcgctgggtggcgggggcgccgggcgccaggtcttccagcatgaggcggtggtatccgtagatgtacctggacatccaggtgatgccggcggcggtggtggtggcgcgcgcgtagtcgcggacccggttccagatgtttcgcaggggcgagaagtgttccatggtcggcacgctctggccggtgaggcgcgcgcagtcgttgacgctctatacacacacaaaaacgaaagcgtttacagggctttcgttctgtagcctggaggaaagtaaatgggttgggttgcggtgtgccccggttcgagaccaagctgagctcggccggctgaagccgcagctaacgtggtattggcagtcccgtctcgacccaggccctgtatcctccaggatacggtcgagagcccttttgctttcttggccaagcgcccgtggcgcgatctgggatagatggtcgcgatgagaggacaaaagcggctcgcttccgtagtctggagaaacaatcgccagggttgcgttgcggcgtaccccggttcgagcccctatggcggcttgaatcggccggaaccgcggctaacgagggccgtggcagccccgtcctcaggaccccgccagccgacttctccagttacgggagcgagccccttttgttttttattttttagatgcatcccgtgctgcggcagatgcgcccctcgccccggcccgatcagcagcagcaacagcaggcatgcagacccccctctcccctttccgccccggtcaccacggccgcggcggccgtgtcgggcgcggggggcgcgctggagtcagatgagccaccgcggcggcgacctaggcagtatctggacttggaagagggcgagggactggcgcggctgggggcgaactctccagagcgccacccgcgggtgcagttgaaaagggacgcgcgcgaggcgtacctgccgcggcagaacctgtttcgcgaccgcgggggcgaggagcccgaggagatgcgagactgcaggttccaagcggggcgcgagctgcggcgcgggctggacagacagcgcctgctgcgcgaggaggactttgagcccgacacgcagacgggcatcagccccgcgcgcgcgcacgtagccgcggccgacctggtgaccgcctacgagcagacggtaaaccaggagcgcaacttccaaaagagcttcaacaaccacgtgcgcacgctggtggcgcgcgaggaggtgaccctgggtctcatgcatctgtgggacctggtggaggcgatcgtgcagaaccccagcagcaagcccctgaccgcgcagctgttcctggtggtgcagcacagcagggacaacgaggccttcagggaggcgctgctgaacatcaccgagccggaggggcgctggctcctggacctgataaacatcctgcagagcatagtggtgcaggagcgcagcctgagcctggccgagaaggtggcggccatcaactactctatgctgagcctgggcaagttctacgcccgcaagatctacaagaccccctacgtgcccatagacaaggaggtgaagatagacagcttctacatgcgcatggcgctgaaggtgctgaccctgagcgacgacctgggagtgtaccgcaacgagcgcatccacaaggccgtgagcgccagccggcggcgcgagctgagcgaccgcgagctgatgcacagtctgcagcgcgcgctgaccggcgcgggcgagggcgacagggaggtcgagtcctacttcgacatgggggccgacctgcactggcagccgagccgccgcgccctggaggcggcgggggcgtacggcggccccctggcggccgatgaccaggaagaggaggactatgagctagaggagggcgagtacctggaggactgacctggctggtggtgttttggtatagatgcaagatccgaacgtggcggacccggcggtccgggcggcgctgcaaagccagccgtccggcattaactcctctgacgactgggccgcggccatgggtcgcatcatggccctgaccgcgcgcaaccccgaggctttcaggcagcagcctcaggccaaccggctggcggccatcttggaagcggtagtgcccgcgcgctccaaccccacccacgagaaggtgctggccatagtcaacgcgctggcggagagcagggccatccgcgcggacgaggccggactggtgtacgatgcgctgctgcagcgggtggcgcggtacaacagcggcaacgtgcagaccaacctggaccgcctggtgacggacgtgcgcgaggccgtggcgcagcgcgagcgcttgcatcaggacggtaacctgggctcgctggtggcgctaaacgccttcctcagcacccagccggccaacgtaccgcgggggcaggaggactacaccaactttttgagcgcgctgcggctgatggtgaccgaggtccctcagagcgaggtgtaccagtcggggcccgactacttcttccagaccagcagacagggcttgcaaaccgtgaacctgagccaggctttcaagaacctgcgggggctgtggggagtgaaggcgcccaccggcgaccgggctacggtgtccagcctgctaacccccaactcgcgcctgctgctgctgctgatcgcgcccttcacggacagcgggagcgtctcgcgggagacctatctgggccacctgctgacgctgtaccgcgaggccatcgggcaggcgcaggtggacgagcacaccttccaagagatcaccagcgtgagccacgcgctggggcaggaggacacgggcagcctgcaggcgaccctgaactacctgctgaccaacaggcggcagaagattcccacgctgcacagcctgacccaggaggaggagcgcatcttgcgctacgtgcagcagagcgtgagcctgaacctgatgcgcgacggcgtgacgcccagcgtggcgctggacatgaccgcgcgcaacatggaaccgggcatgtacgcctcccaccggccgtttatcaaccgcctgatggactacttgcatcgggcggcggccgtgaaccccgagtacttcactaatgccattctgaatccccactggatgccccctccgggtttctacaacggggactttgaggtgcccgaggtcaacgacgggttcctctgggatgacatggatgacagtgtgttctcacccaacccgctgcgcgccgcgtctctgcgattgaaggagggctctgacagggaaggaccgaggagtctggcctcctccctggctctgggagcggtgggcgccacgggcgcggcggcgcggggcagtagccccttccccagcctggcagactctctgaacagcgggcgggtgagcaggccccgcttgctaggcgaggaggagtatctgaacaactccctgctgcagcccgcgagggacaagaacgctcagcggcagcagtttcccaacaatgggatagagagcctggtggacaagatgtccagatggaagacgtatgcgcaggagtacaaggagtgggaggaccgccagccgcggcccttgccgccccctaggcagcgctggcagcggcgcgcgtccaaccgccgctggaggcaggggcccgaggacgatgatgactctgcagatgacagcagcgtgttggacctgggcgggagcgggaaccccttttcgcacctgcgcccacgcctgggcaagatgttttaaaagaaaaaaaaaaataaaactcaccaaggccatggcgacgagcgttggttttttgttcccttccttagtatgcggcgcgcggcgatgttcgaggaggggcctcccccctcttacgagagcgcgatggggatttctcctgcggcgcccctgcagcctccctacgtgcctcctcggtacctgcaacctacaggggggagaaatagcatctgttactctgagctgcagcccctgtacgataccaccagactgtacctggtggacaacaagtccgcggacgtggcctccctgaactaccagaacgaccacagcgattttttgaccacggtgatccaaaacaacgacttcaccccaaccgaggccagcacccagaccataaacctggataacaggtcgaactggggcggcgacctgaagaccatcttgcacaccaacatgcccaacgtgaacgagttcatgttcaccaactcttttaaggcgcgggtgatggtggcgcgcgagcagggggaggcgaagtacgagtgggtggacttcacgctgcccgagggcaactactcagagaccatgactctcgacctgatgaacaatgcgatcgtggaacactatctgaaagtgggcaggcagaacggggtgaaggaaagcgatatcggggtcaagtttgacaccagaaacttccgtctgggctgggaccccgtgaccgggctggtcatgccgggggtctacaccaacgaggcctttcatcccgacatagtgcttctgcccggctgtggggtggacttcacccagagccggctgagcaacctgctgggcattcgcaagcggcagcctttccaggagggtttcaagatcacctatgaggatctgaaggggggcaacattcccgcgctccttgatctggacgcctacgaggagagcttgaaacccgaggagagcgctggcgacagcggcgagagtggcgaggagcaagccggcggcggtggcggcgcgtcggtagaaaacgaaagtacgcccgcagtggcggcggacgctgcggaggtcgagccggaggccatgcagcaggacgcagaggagggcgcacaggagggcgcgcagaaggacatgaacgatggggagatcaggggagacacattcgccacccggggcgaagaaaaagaggcagaggcggcggcggcggcgacggcggaggccgaaaccgaggttgaggcagaggcagagcccgagaccgaagttatggaagacatgaatgatggagaacgtaggggcgacacgttcgccacccggggcgaagagaaggcggcggaggcagaagccgcggctgaggaggcggctgcggctgcggccaagactgaggctgcggctaaggctgaggtcgaagccaatgttgcggttgaggctcaggctgaggaggaggcggcggctgaagcagttaaggaaaaggcccaggcagagcaggaagagaaaaaacctgtcattcaacctctaaaagaagatagcaaaaagcgcagttacaacgtcatcgagggcagcacctttacccagtaccgcagctggtacctggcgtacaactacggcgacccggtcaagggggtgcgctcgtggaccctgctctgcacgccggacgtcacctgcggctccgagcagatgtactggtcgctgccgaacatgatgcaagacccggtgaccttccgctccacgcggcaggttagcaacttcccggtggtgggcgccgaactgctgcccgtgcactccaagagtttttacaacgagcaggccgtctactcccagctgatccgccaggccacctctctgacccacgtgttcaatcgctttcccgagaaccagattttggcgcgcccgccggcccccaccatcaccaccgtgagtgaaaacgttcctgccctcacagatcacgggacgctaccgctgcgcaacagcatctcaggagtccagcgagtgaccattactgacgccagacgccggacctgcccctacgtttacaaggccttgggcatagtctcgccgcgcgtcctctccagtcgcactttttaaaacacatctacccacacgttccaaaatcatgtccgtactcatctcacccagcaacaacaccggctgggggctgcgcgcgcccagcaagatgtttggaggggcgaggaagcgctccgaccagcaccctgtgcgcgtgcgcggccactaccgcgcgccctggggagcgcacaagcgcgggcgcacagggcgcaccactgtggacgacgtcattgactccgtagtggagcaagcgcgccactacacacccggcgcgccgaccgcccccgccgtgtccaccgtggaccaggcgatcgaaagcgtggtacagggcgcgcggcactatgccaaccttaaaagtcgccgccgccgcgtggcccgccgccatcgccggagaccccgggccaccgccgccgcgcgccttactaaggctctgctcaggcgcgccaggcgaactggccaccgggccgccatgagggccgcacggcgggctgccgctgccgcaagcgtcgtggccccgcgggcacgaaggcgcgcggccgctgccgccgccgccgccatttccagcttggcctcgacgcggcgcggtaacatatactgggtgcgcgactcggtaaccggcacgcgggtacccgtgcgctttcgccccccgcggaattagcacaagacaacatacacactgagtctcctgctgttgtgtatcccagcggcgaccgtcagcagcggcgacatgtccaagcgcaaaattaaagaagagatgctccaggtcatcgcgccggagatctatgggcccccgaagaaggaggaggatgattacaagccccgcaagctaaagcgggtcaaaaagaaaaagaaagatgatgatgacgaggcggtggagtttgtccgccgcatggcacccaggcgccccgtgcagtggaagggccggcgcgtgcagcgcgttttgcgccccggcaccgcggtggtcttcacgcccggcgagcgctccacgcgcactttcaagcgggtgtacgatgaggtgtacggcgacgaggacctgttggagcaggccaaccagcgctttggggagtttgcatatgggaaacggccccgcgagagtctaaaagaggacctgctggcgctaccgctggacgagggcaatcccaccccgagtctgaagccggtaaccctgcaacaggtgctgcctttgagcgcgcccagcgagcataagcgagggttgaagcgcgaaggcggggacctggcgcccaccgtgcagttgatggtgcccaagcggcagaagctggaggacgtgctggagaaaatgaaagtagagcccgggatccagcccgagatcaaggtccgccccatcaagcaggtggcgcccggcgtgggagtccagaccgtggacgttaggattcccacggaggagatggaaacccaaaccgccactccctcttcggcggccagcgccaccaccggcaccgcttcggtagaggtgcagacggacccctggctacccgccaccgctgttgccgccgccgccccccgttcgcgcgggcgcaagagaaattatccagcggccagcgcgctcatgccccagtacgcactgcatccatccatcgtgcccacccccggctaccgcgggtactcgtaccgcccgcgcagatcagccggcactcgcggccgccgccgccgtgcgaccacaaccagccgccgccgtcgccgccgccgccagccagtgctgacccccgtgtctgtaaggaaggtggctcgctcggggagcacgctggtggtgcccagagcgcgctaccaccccagcatcgtttaaagccggtctctgtatggttcttgcagatatggccctcacttgtcgcctccgcttcccggtgccgggataccgaggaagaactcaccgccgcagaggcatggcgggcagcggtctccgcggcggccgtcgccatcgccggcgcgcaaaaagcaggcgcatgcgcggcggtgtgctgcctctgctaatcccgctaatcgccgcggcgatcggtgccgtacccgggatcgcctccgtggccctgcaggcgtcccagaaacgttgactcttgcaaccttgcaagcttgcattttttggaggaaaaaataaaaaaaaagtctagactctcacgctcgcttggtcctgtgactattttgtagaaaaaaagatggaagacatcaactttgcgtcgctggccccgcgtcacggctcgcgcccgttcatgggagactggacagatatcggcaccagcaatatgagcggtggcgccttcagctggggcagtctgtggagcggccttaaaaattttggttccaccattaagaactatggcaacaaagcgtggaacagcagcacgggccagatgctgagagacaagttgaaagagcagaacttccaggagaaggtggcgcagggcctggcctctggcatcagcggggtggtggacatagctaaccaggccgtgcagaaaaagataaacagtcatctggacccccgtcctcaggtggaggaaatgcctccagcgatggagacggtgtctcccgagggcaaaggcgaaaagcgcccgcggcccgacagagaagagaccctggtgtcacacaccgaggagccgccctcttacgaggaggcagtcaaggccggcctgcccaccactcgccccatagcccccatggccaccggtgtggtgggccacaggcaacacactcccgcaacactagatctgcccccgccgtccgagccgccgcgccagccaaaggcggcgacggtgcccgctccctccacttccgccgccaacagagtgcccctgcgccgcgccgcgagcggcccccgggcctcgcgagttagcggcaactggcagagcacactgaacagcatcgtgggcctgggagtgaggagtgtgaagcgccgccgttgctactgaatgagcaagctagctaacgtgttgtatgtgtgtatgcgtcctatgtcgccgccagaggagctgttgagccgccggcgccgtctgcactccagcgaatttcaagatggcgaccccatcgatgatgcctcagtggtcgtacatgcacatctcgggccaggacgcttcggagtacctgagccccgggctggtgcagttcgcccgcgccacagacacctacttcaacatgagtaacaagttcaggaaccccactgtggcgcccacccacgatgtgaccacggaccggtcgcagcgcctgacgctgcggttcatccccgtggatcgggaggacaccgcctactcttacaaggcgcggttcacgctggccgtgggcgacaaccgcgtgctggacatggcctccacttactttgacatcaggggggtgctggacaggggccccaccttcaagccctactcgggtactgcctacaactccctggcccccaagggcgctcccaattcttgcgagtgggaacaagatgaaccagctcaggcagcaatagctgaagatgaagaagaacttgaagaagaacaagctcaggacgaacaggcgcccactaagaaaacccatgtatacgcccaggcacctctttctggtgaaaaaattactaaggatggtttgcaaataggtgtggatgccacacaggcgggagataaccctatatatgctgataaaacattccaacccgaacctcagataggtgagtctcagtggaacgaggctgatgccacagtagcaggaggcagagtcttaaaaaagaccacccctatgagaccttgctatggatcctatgccaaacctactaatgccaatggcggtcaagggatcatggtggccaatgatcagggagcgcttgaatctaaagttgagatgcaatttttctccaccacaacgtctcttaatgtaagggaaggtgaaaacaatcttcagccaaaagtagtgctatacagcgaagatgttaacttggaatcccctgacactcatttgtcttacaaacctaaaaaggatgacaccaactctaaaatcatgttgggtcagcaagccatgcccaacagacccaacctcattgcttttagggacaactttattggacttatgtactacaacagcacaggcaacatgggagtgctggcaggacaggcctcccagctaaacgctgtggtagacttgcaagacagaaacacagagctgtcataccaactgatgcttgattccattggagacagatcaagatacttttccatgtggaaccaggcagtggacagctatgacccagatgtcagaatcattgaaaaccatggggttgaagatgagctgcccaactattgctttcccctgggcggtattggaattacagacacataccagtgcataaaaccaaccgcagctgctaataacactacatggtctaaggatgaagaatttagtgatcgcaatgaaataggggtgggaaacaacttcgccatggagatcaacatccaggccaacctctggaggaacttcctctatgcgaacgtggggctctacctgccagacaagctcaagtacaaccccaccaacgtggacatctctgacaaccccaacacctatgactacatgaacaagcgtgtggtggctcccggcctggtggactgctttgtcaatgtgggagccaggtggtccctggactacatggacaacgtcaaccccttcaaccaccaccgcaatgcgggtctgcgctaccgctccatgatcctgggcaacgggcgctacgtgcccttccacattcaggtgccccagaagttctttgccatcaagaacctcctcctcctgccgggctcctacacttacgagtggaacttcaggaaggatgtcaacatggtcctgcagagctctctgggcaatgaccttagggtggacggggccagcatcaagtttgacagcgtcaccctctatgctaccttcttccccatggctcacaacaccgcctccacgctcgaggccatgctgaggaacgacaccaacgaccagtccttcaatgactacctctctggggccaacatgctctaccccatccccgccaaggccaccaacgtgcccatctccattccctctcgcaactgggccgccttcagaggctgggcctttacccgccttaagaccaaggaaaccccctccctgggctcgggttttgacccctactttgtctactcgggatccatcccctacctggatggcaccttctacctcaaccacacttttaagaagatatccatcatgtatgactcctccgtcagctggccgggcaatgaccgcctgctcacccccaatgagttcgaggtcaagcgcgccgtggacggcgagggctacaacgtggcccagtgcaacatgaccaaggactggttcctggtgcagatgctggccaactacaacataggctaccagggcttctacatcccagagagctacaaggacaggatgtactccttcttcagaaatttccaacccatgagcaggcaggtggtggacgagaccaaatacaaggactatcaggccattggcatcactcaccagcacaacaactcgggattcgtgggctacctggctcccaccatgcgcgaggggcaggcctaccccgccaacttcccctacccgttgataggcaaaaccgcggtcgacagcgtcacccagaaaaagttcctctgcgaccgcaccctctggcgcatccccttctctagcaacttcatgtccatgggtgcgctcacggacctgggccagaacctgctctatgccaactccgcccatgcgctggacatgacttttgaggtggaccccatggacgagcccacccttctctatattgtgtttgaagtgttcgacgtggtcagagtgcaccagccgcaccgcggtgtcatcgagaccgtgtacctgcgcacgcccttctcggccggcaacgccaccacctaaggagacagcgccgccgcctgcatgacgggttccaccgagcaagagctcagggccatcgccagagacctgggatgcggaccctattttttgggcacctatgacaaacgcttcccgggcttcatctcccgagacaagctcgcctgcgccatcgtcaacacggccgcgcgcgagaccgggggcgtgcactggctggcctttggctgggacccgcgctccaaaacctgctacctcttcgacccctttggcttctccgatcagcgcctcagacagatctatgagtttgagtacgaggggctgctgcgccgcagcgcgcttgcctcctcgcccgaccgctgcatcacccttgagaagtccaccgagaccgtgcaggggccccactcggccgcctgcggtctcttctgctgcatgtttttgcacgcctttgtgcgctggccccagagtcccatggatcgcaaccccaccatgaacttgctcaagggagtgcccaacgccatgctccagagcccccaggtccagcccaccctgcgccacaaccaggaacagctctaccgcttcctggagcgccactccccctacttccgcagtcacagcgcgcacatccggggggccacctctttctgccacttgcaagaaaacatgcaagacggaaaatgatgtacagctcgctttttaataaatgtaaagactgtgcactttatttatacacgggctctttctggttatttattcaacaccgccgtcgccatctagaaatcgaaagggttctgccgcgcgtcgccgtgcgccacgggcagagacacgttgcgatactggaagcggctcgcccacttaaactcgggcaccaccatgcggggcagtggttcctcggggaagttctcgccccacagggtgcgggtcagctgcagcgcgctcaggaggtcgggagccgagatcttgaagtcgcagttggggccggaaccctgcgcgcgcgagttgcggtacacggggttgcagcactggaacaccagcagggccggattatgcacgctggccagcaggctctcgtcgctgatcatgtcgctgtccagatcctccgcgttgctcagggcgaacggggtcatcttgcagacctgcctgcccaggaaaggcggcagcccgggcttgccgttgcagtcgcagcgcaggggcatcagcaggtgcccgcggcccgactgcgcctgcgggtacagcgcgcgcatgaaggcttcgatctgcctgaaagccacctgcgtcttggctccctccgaaaagaacatcccacaggacttgctggagaactggttcgcgggacagctggcatcgtgcaggcagcagcgcgcgtcggtgttggcgatctgcaccacgttgcgaccccaccggttcttcactatcttggccttggaagcctgctccttcagcgcgcgctggccgttctcgctggtcacatccatctctatcacctgctccttgttgatcatgtttgtaccgtgcagacacttcaggtcgccctccgtctgggtgcagcggtgctcccacagcgcgcaaccggtgggctcccaatttttgtgggtcacccccgcgtaggcctgcaggtaggcctgcaagaagcgccccatcatggccacaaaggtcttctggctcgtaaaggtcagctgcaggccgcgatgctcttcgttcagccaggtcttgcagatggcggccagcgcctcggtctgctcgggcagcatcctaaaatttgtcttcaggtcgttatccacgtggtacttgtccatcatggcgcgcgccgcctccatgcccttctcccaggcggacaccatgggcaggcttagggggtttatcacttccaccggcgaggacaccgtactttcgatttcttcttcctccccctcttcccggcgcgcgcccacgctgctgcgcgctctcaccgcctgcaccaaggggtcgtcttcaggcaagcgccgcaccgagcgcttgccgcccttgacctgcttaatcagcaccggcgggttgctgaagcccaccatggtcagcgccgcctgctcttcttcgtcttcgctgtctaccactatctctggggaagggcttctccgctctgcggcggcgcgcttcttttttttcttgggagcggccgtgatggagtccgccacggcgacggaggtcgagggcgtggggctgggggtgcgcggtaccagggcctcgtcgccctcggactcttcctctgactccaggcggcggcggagtcgcttctttgggggcgcgcgcgtcagcggcggcggagacggggacggggacggggacgggacgccctccacagggggtggtcttcgcgcagacccgcggccgcgctcgggggtcttctcgagctggtcttggtcccgactggccattgtatcctcctcctcctaggcagagagacataaggagtctatcatgcaagtcgagaaggaggagagcttaaccaccccctctgagaccgccgatgcgcccgccgtcgccgtcgcccccgctgccgccgacgcgcccgccacaccgagcgacacccccgcggacccccccgccgacgcacccctgttcgaggaagcggccgtggagcaggacccgggctttgtctcggcagaggaggatttgcgagaggaggaggataaggagaagaagccctcagtgccaaaagatgataaagagcaagacgagcacgacgcagatgcacaccagggtgaagtcgggcggggggacggagggcatgacggcgccgactacctagacgaagggaacgacgtgctcttgaagcacctgcatcgtcagtgcgccattgtttgcgacgctctgcaggagcgcagcgaagtgcccctcagcgtggcggaggtcagccacgcctacgagctcagcctcttctccccccgggtgcccccccgccgccgcgaaaacggcacatgcgagcccaacccgcgcctcaacttctaccccgcctttgtggtacccgaggtcctggccacctatcacatcttctttcaaaattgcaagatccccctctcgtgccgcgccaaccgtagccgcgccgataagatgctggccctgcgccagggcgaccacatacctgatatcgccgctttggaagatgtaccaaagatcttcgagggtctgggtcgcaacgagaagcgggcagcaaactctctgcaacaggaaaacagcgaaaatgagagtcacaccggggtactggtggagctcgagggcgacaacgcccgcctggcggtggtcaagcgcagcatcgaggtcacccactttgcctaccccgcgctaaacctgccccccaaagtcatgaacgcggccatggacgggctgatcatgcgccgcggccggcccctcgctccagatgcaaacttgcatgaggagaccgaggacggccagcccgtggtcagcgacgagcagctggcgcgctggctggagaccgcggaccccgccgaactggaggagcggcgcaagatgatgatggccgtggtgctggtcaccgtagagctggagtgtctgcagcgcttcttcggcgaccccgagatgcagagaaaggtcgaggagaccctgcactacaccttccgccagggctacgtgcgccaggcttgcaagatctccaacgtggagctcagcaacctggtgtcctacctgggcatcttgcatgagaaccgcctcgggcagagcgtgctgcactccaccctgcgcggggaggcgcgccgcgactacgtgcgcgactgcgtttacctcttcctctgctacacctggcagacggccatgggggtctggcagcagtgcctggaggagcgcaacctcaaggagctggagaagctcctgcagcgcgcgctcaaagatctctggacgggctacaacgagcgctcggtggccgccgcgctggccgacctcatcttccccgagcgcctgctcaaaaccctccagcaggggctgcccgacttcaccagccaaagcatgttgcaaaacttcaggaactttatcctggagcgttctggcatcctacccgccacctgctgcgccctgcccagcgactttgtccccctcgtgtaccgcgagtgccccccgccgctgtggggtcactgctacctgttccaactggccaactacctgtcctaccacgcggacctcatggaggactccagcggcgaggggctcatggagtgccactgccgctgcaacctctgcacgccccaccgctccctggtctgcaacacccaactgctcagcgagagtcagattatcggtaccttcgagctacagggtccgtcctcctcagacgagaagtccgcggctccggggctaaaactcactccggggctgtggacttccgcctacctgcgcaaatttgtacctgaagactaccacgcccacgagatcaggttttacgaagaccaatcccgcccgcccaaggcggagctgaccgcctgcgtcatcacccagggcgagatcctaggccaattgcaagccatccaaaaagcccgccaagactttttgctgaagaagggtcggggggtgtatctggacccccagtcgggtgaggagctcaacccggttcccccgctgccgccgccgcgggaccttgcttcccaggataagcatcgccatggctcccagaaagaagcagcagcggccgccactgccgccaccccacatgctggaggaagaggaggaatactgggacagtcaggcagaggaggtttcggacgaggaggagccggagacggagatggaagagtgggaggaggacagcttagacgaggaggcttccgaagccgaagaggcagacgcaacaccgtcaccctcggccgcagccccctcgcaggcgcccccgaagtccgctcccagcatcagcagcaacagcagcgctataacctccgctcctccaccgccgcgacccacggccgaccgcagacccaaccgtagatgggacaccaccggaaccggggccggtaagtcctccgggagaggcaagcaagcgcagcgccaaggctaccgctcgtggcgcgctcacaagaacgccatagtcgcttgcttgcaagactgcggggggaacatctccttcgcccgccgcttcctgctcttccaccacggtgtggccttcccccgtaacgtcctgcattactaccgtcatctctacagcccctactgcggcggcagtgagccagagacggtcggcggcggcggcggcgcccgtttcggcgcctaggaagacccagggcaagacttcagccaagaaactcgcggcggccgcggcgaacgcggtcgcgggggccctgcgcctgacggtgaacgaacccctgtcgacccgcgaactgaggaaccgaatcttccccactctctatgccatcttccagcagagcagagggcaggatcaggaactgaaagtaaaaaacaggtctctgcgctccctcacccgcagctgtctgtatcacaagagcgaagaccagcttcggcgcacgctggaggacgctgaggcactcttcagcaaatactgcgcgctcactcttaaggactagctccgcgcccttctcgaatttaggcgggaacgcctacgtcatcgcagcgccgccgtcatgagcaaggacattcccacgccatacatgtggagctatcagccgcagatgggactcgcggcgggcgcctcccaagactactccacccgcatgaactggctcagtgccggcccacacatgatctcacaggttaatgatatccgcacccatcgaaaccaaatattggtggagcaggcggcaattaccaccacgccccgcaataatcccaaccccagggagtggcccgcgtccctggtgtatcaggaaattcccggccccaccaccgtactacttccgcgtgattcccaggccgaagtccaaatgactaactcaggggcacagctcgcgggcggctgtcgtcacagggtgcggcctcctcgccagggtataactcacctggagatccgaggcagaggtattcagctcaacgacgagtcggtgagctcctcgctcggtctcagacctgacgggaccttccagatagccggagccggccgatcttccttcacgccccgccaggcgtacctgactctgcaaagctcgtcctcggcgccgcgctcgggcggcatcgggactctccagttcgtgcaggagtttgtgccctcggtctacttcaaccccttctcgggctctcccggtcgctacccggaccagttcatctcgaactttgacgccgcgagggactcggtggacggctacgactgaatgtcgggtggacccggtgcagagcaacttcgcctgaagcacctcgaccactgccgccgccctcagtgctttgcccgctgtcagaccggtgagttccagtacttttccctgcccgactcgcacccggacggcccggcgcacggggtgcgctttttcatcccgagtcaggtgcgctctaccctaatcagggagtttaccgcccgtcccctactggcggagttggaaaaggggccttctatcctaaccattgcctgcatctgctctaaccctggattgcaccaagatctttgctgtcatttgtgtgctgagtataataaaggctgagatcagaatctactcgggctcctgtcgccatcctgtcaacgccaccgtccaagcccggcccgatcagcccgaggtgaacctcacctgcggtctgcaccggcgcctgaggaaatacctagcttggtactacaacagcactccctttgtggtttacaacagctttgaccaggacggggtctcactgagggataacctctcgaacctgagctactccatcaggaagaacagcaccctcgagctacttcctccttacctgcccgggacttaccagtgtgtcaccggtccctgcacccacacccacctgttgatcgtaaacgactctcttccgagaacagacctcaataactcctcttcgcagttccccagaacaggaggtgagctcaggaaaccccgggtaaagaagggtggacgagagttaacacttgtggggtttctggtgtatgtgacgctggtggtggctcttttgattaaggcttttccttccatgtctgaactctccctcttcttttatgaacaactcgactagtgctaacgggaccctacccaacgaatcgggattgaatatcggtaaccaggttgcagtttcacttttgattaccttcatagtcctcttcctgctagtgctgtcgcttctgtgcctgcggatcgggggctgctgcatccacgtttatatctggtgctggctgtttagaaggttcggagaccatcgcaggtagaataaacatgctgctgcttaccctctttgtcctggcgctggccgccagctgccaagccttttccgaggctgactttatagagccccagtgtaatgtgacttttaaagcccatgcacagcgttgtcatactataatcaaatgtgccaccgaacacgatgaataccttatccagtataaagataaatcacacaaagtggcacttgttgacatctggaaacccgaagaccctttggaatacaatgtgaccgttttccagggtgacctcttcaaaatttacaattacactttcccatttgaccagatgtgtgactttgtcatgtacatggaaaagcagcacaagctgtggcctccgactccccagggctgtgtggaaaatccaggctctttctgcatgatctctctctgtgtaactgtgctggcactaatactcacgcttttgtatatcagatttaaatcaaggcaaagcttcattgatgaaaagaaaatgccttaatcgctttcacgcttgattgctaacaccgggtttttatccgcagaatgattggaatcaccctactaatcacctccctccttgcgattgcccatgggttggaacgaatcgaagtccctgtgggggccaatgttaccctggtggggcctgtcggcaatgctacattaatgtgggaaaaatatactaaaaatcaatgggtctcttactgcactaacaaaaatagccacaagcccagagccatctgcgatgggcaaaatctaaccttgattgatgttcaattgctggatgcgggctactattatgggcagctgggtacaatgattaattactggagaccccacagagattacatgctccacgtagtaaagggtccccttagcagcccacccactaccacctctactacccccactaccaccactactcccaccaccagcactgccgcccagcctcctcatagcagaacaaccacttttatcaattccaagtcccactccccccacattgccggcgggccctccgcctcagactccgaaaccaccgagatctgcttctgcaaatgctctgacgccattgcccaggatttggaagatcacgaggaagatgagcatgacttcgcagatgcatgccaggcatcagagccagaagcgctgccggtggccctcaaacagtatgcagacccccacaccacccccgaccttcctccaccttcccagaagccaagtttcctgggggaaaatgaaactctgcctctctccatactcgctctgacatctgttgctatgttgaccgctctgctggtgcttctatgctctatatgctacctgatctgctgcagaaagaaaaaatctcacggccatgctcaccagcccctcatgcacttcccttaccctccagagctgggcgaccacaaactttaagtctgcagtaactatctgcccatcccttgtcagtcgacagcgatgagccccactaatctaacggcctctggacttacaacatcgtctcttaatgagaccaccgctcctcaagacctgtacgatggtgtctccgcgctggttaaccagtgggatcacctgggcatatggtggctcctcataggagcagtgaccctgtgcctaatcctggtctggatcatctgctgcatcaaaagcagaagacccaggcggcggcccatctacaggccctttgtcatcacacctgaagatgatgatgacaccacttccaggctgcagaggctaaagcagctactcttctcttttacagcatggtaaattgaatcatgcctcgcattttcatctacttgtctctccttccactttttctgggctcttctacattggccgctgtgtcccacatcgaggtagactgcctcacgcccttcacagtctacctgcttttcggctttgtcatctgcacctttgtctgcagcgttatcactgtagtgatctgcttcatacagtgcatcgactacgtctgcgtgcgggtggcttactttagacaccacccccagtatcgcaacagggacatagcggctctcctaagacttgtttaaaatcatggccaaattaactgtgattggtcttctgatcatctgctgcgtcctagccgcgattgggactcaagctcctaccaccaccagcgctcccagaaagagacatgtatcctgcagcttcaagcgtccctggaatataccccaatgctttactgatgaacctgaaatctctttggcttggtacttcagcgtcaccgcccttcttatcttctgcagtacggttattgcccttgccatctacccttcccttgacctgggctggaatgctgtcaactctatggaatatcccaccttcccagaaccagacctgccagacctggttgttctaaacgcgtttcctcctcctgctcccgttcaaaatcagtttcgccctccgtcccccacgcccactgaggtcagctactttaatctaacaggcggagatgactgaaaacctagacctagaaatggacggtctctgcagcgagcaacgcacactagagaggcgccggcaaaaagagctcgagcgtcttaaacaagagctccaagacgcggtggccatacaccagtgcaaaaaaggtgtcttctgtctggtaaaacaggccacgctcacctatgaaaaaacaggtgacacccaccgcctaggatacaagctgcccacacagcgccaaaagttcgccctcatgataggcgaacaacccatcaccgtgacccagcactccgtggagacagaaggctgcatacatgctccctgtaggggcgctgactgcctctacaccttgatcaaaaccctctgcggtctcagagaccttatccctttcaattaatcataactgtaatcaataaaaaatcacttacttgaaatctgatagcaagcctctgtccaattttttcagcaacacttccttcccctcctcccaactctggtactctaggcgcctcctagctgcaaacttcctccacagtctgaagggaatgtcagattcctcctcctgtccctccgcacccacgatcttcatgttgttgcagatgaaacgcgcgagatcgtctgacgagaccttcaaccccgtgtacccctacgataccgagatcgctccgacttctgtccctttccttacccctccctttgtgtcatccgcaggaatgcaagaaaatccagctggggtgctgtccctgcacttgtcagagccccttaccacccacaatggggccctgactctaaaaatggggggcggcctgaccctggacaaggaagggaatctcacttcccaaaacatcaccagtgtcgatccccctctcaaaaaaagcaagaacaacatcagccttcagaccgccgcacccctcgccgtcagctccggggccctaacactttttgccactccccccctagcggtcagtggtgacaaccttactgtgcagtctcaggcccctctcactttggaagactcaaaactaactctggccaccaaaggacccctaactgtgtccgaaggcaaacttgtcctagaaacagaggctcccctgcatgcaagtgacagcagcagcctgggccttagcgttacggccccacttagcattaacaatgacagcctaggactagatctgcaggcacccattgtctctcaaaatggaaaactggctctaaatgtagcaggccccctagctgtggccaatggcattaatgctttgacagtaggcacaggcaaaggtattggtctaaatgaaaccagcactcacttgcaagcaaagttggtcgcccccctaggctttgataccaatggcaacattaagctaagcgttgcaggaggcatgagactaaataatgacacacttatactagatgtaaactacccatttgaagctcaaggccaactaagtctaagagtgggccagggtccgctgtatgtagattctagcagccataacctgaccattagatgccttagaggattatacataacatcgtctaataaccaaaccggtctagaggccaacataaaactaacaaaaggccttgtctatgatggaaatgccatagcagtcaatgttggtcaaggattgcaatacagcactactgccacatcggaaggtgtgtatcctatacagtctaagataggtttgggaatggaatatgataccaacggagccatgatgacaaaactaggctctggactaagctttgacaattcaggagccattgtagtgggaaacaaaaatgatgacaggcttactctgtggactacaccagacccatctcctaactgtagaatttattctgaaaaagatactaaactaaccttggtgctgactaagtgtggcagccaaatcctaggcacagtatctgcccttgctgtcagaggcagccttgcgcccatcactaatgcatccagcatagtccaaatatttctaagatttgatgaaaatggactattgatgagcaactcatcgctagacggtgattactggaattacagaaatggggactccactaatagcacaccatatacaaatgcagtaggctttatgcctaatctagcagcctatcctaaaggtcaggctacagctgcaaaaagcagtattgtaagccaggtatacatggatggtgacactactaaacctataacactaaaaataaacttcaatggcattgatgaaacaacagaaaatacccctgttagtaaatattccatgacattctcatggagctggcccaccgcaagctacataggccacacttttgcaacaaactcttttactttctcctacatcgcccaagaataaagaaagcacagagatgcttgttttgatttcaaaattgtgtgcttttatttattttcagcttacagtatttccagtagtcattcgaataaagcttaatcaaactgcatgagaacccttccacatagcttaaattagcaccagtgcaaatggagaaaattcaacataccttttttatccagatatcagagaactctagtggtcagttttcccccaccctcccagctcacagaatacacagtcctttccccccggctggctttaaacaacactatctcattggtaacagacatattcttaggtgtaataatccacacggtctcttggcgggccaagcgctggtcggtgatgttaataaactccccaggcagctctttcaagttcacgtcgctgtccaactgctgaagcgctcgcggctccgactgcgcctctagcggaggcaacggcaacacccgatccttgatctataaaggagtagagtcataatcccccataagaatagggcggtgatgcagcaacaaggcgcgcagcaactcctgccgccgcctctccgtacgacaggaatgcaacggcgtggtggtctcctccgcgataatccgcaccgctcgcagcatcagcatcctcgtcctccgggcacagcagcgcatcctgatctcactgagatcggcgcagtaagtgcagcacaaaaccaagatgttatttaagatcccacagtgcaaagcactgtacccaaagctcatggcgggaaggacagcccccacgtgaccatcataccagatccttaggtaaatcaaatgacgacctctcataaacacgctggacatgtacatcacctccttgggcatgcgctgattcaccacctctcgataccacaagcatcgctgattaattaaagacccctcaagcaccatcctgaaccaggaagccagcacctgaccccccgccaggcactgcagggaccccggtgaattgcagtggcagtgaagactccagcgctcgtagccgtgaaccatagagccggtcattatatccacattggcacaacacaaacacactttcatacactttttcatgattagcagctcctctctagtcaggaccatatcccaaggaatcacccactcttgaatcaaggtaaatcccacacagcagggcaggcctctcacataactcacgttatgcatagtgagcgtgtcgcaatctggaaataccggatgatcttccatcaccgaagctcgcgtctccgtctcaaagggaggtaaacggtccctcgtgtagggacagtggcgggataatcgagatcgtgttgaacgtagagtcatgccaaagggaacagcggacgtactcatatttcctccagcagaaccaagtgcgcgcgtggcagctatccctgcgtcttctgtctcgccgcctgccccgctcggtgtagtagttgtaatacagccactccctcagaccgtcaaggcgctccctggcgtccggatctataacaacaccgtcctgcagcgccgccctgatgacatccaccaccgtagagtatgccaagcccagccaggaaatgcattcactttgacagcgagagataggaggagcgggaagagatggaagaaccatgatagtaaaagacttttattccaatcgatcctctacaatgtcaaagtgtagatctataagatgacactggtctcctccgctgagtcgatcaaaaataacagctaaaccacaaacaacacgattggtcaaatgctccacaagggcttgcagcataaaatcgcctcgaaagtccaccgcaagcataacatcaaagccaccgcccctatcatgatctataataaaaaccccacagctatccaccagacccataaagttttcatctctccatcgtgaaaaaatatttacaagctcctcctttaaatcacctccaaccaattgaaaaagttgagccaaaccgccctccaccttcattttcagcaagcgcatcatgattgcaaaaattcaggctcctgagacacctgtataagattgagaagcggaacgttaacgtcaatgtttcgctcgcgaagatcgcgcctcagtgcaagcatgatataatcccacaggtcggagcggatcagcgaggacatctccccgccaggaaccaactcaacggagcctatgctgattataatacgcatattcggggctatgctgaccagcacggcccccaaataggcgtactgcataggcggcgacaaaaagtgaacagtttgggttaaaaaatcaggcaaacagtcgcgcaaaaaagcaagaacatcataaccatgctcatgcaaatagatgcaagtaagctcaggaacgaccacagaaaaatgcacaatttttctctcaaacatgactgcgagccctgcaaaaaataaaaaagaaacattacacaagagtagcctgtcttacgatgggatagactactctaaccaacataagacgggccacaacatcgcccgcgtggccataaaaaaaattgtccgtgtgattaaaaagaagcacagatagctggccagtcatatccggagtcatcacgtgtgaacccgtgtagacccccgggttggacacatcggccaaacaaagaaagcggccaatgtacccaggaggaatcataacactaagacgaagatacaacagaataaccccatgagggggaataacaaagttagtaggtgaataaaaacgataaacacccgaaactccctcctgcgtaggcaaaatagcaccctccccttccaaaacaacatatagcgcttccacagcagccatgacaaaagactcaaaacactcaaaagactcagtcttaccaggaaaataaaagcactctcacagcaccagcactaatcagagtgtgaagagggccaagtgccgaacgagtatatataggaataaaaaatgacgtaaatgtgtaaaggtcagaaaacgcccagaaaaatacacagaccaacgcccgaaacgaaaacccgcgaaaaaatacccagaacttcctcaacaaccgccacttccggtttctcacggtacgtcacttccgcaagaaaagcaaaactacatttcccacatgtgtaaaaacgaaaccccgccccttgtaactgcccacaacttacatcatcaaaacataaactcctacgtcacccgccccgcctctccccgcccacctcattatcatattggccacaatccaaaataaggtatattat

SEQ ID NO: 25 - DNA, 28 bp, Gorilla beringei graueri
ccccgttctgccttcaaattcgtctaca

SEQ ID NO: 26 - DNA, 1284 bp, Gorilla beringei graueri
ccttccgcgccgagcgcccccagcgcaccaacctcgggcccaacatgctggccccctcccacgagctctatgactacgtgcgcgccagcatccgcggggggcgctgctaccccacctacctcggcatcctcagggaacccctgtacgtgtatgacatctgcggcatgtacgcctccgcgctcacccaccccatgccctggggcccgcccctcaacccctacgagcgcgcgctcgccgcccgcgaatggcagcgggctctggacatgcaagcttgcaagatcgactactttgacccgcgcttgctccccggggtcttcaccatcgacgcggaccccccaaacgaggaccagctggaccccctaccccccttctgctcgcgcaagggcggccgcctctgctggaccaacgagcgcctgcgcggcgaggtcgccaccagcgtcgacatggtcaccctgcacaaccgaggctggagggtgcgcctgatcccagacgagcgcaccaccgtcttccccgagtggaagtgcgtggcccgcgagtacgtgcaactcaacatcgcggccaaggagcgagccgaccgcgacaaaaaccagaccctgcgctccatcgccaagctgctctccaacgccctctacgggtcgttcgccaccaagcttgacaacaaaaaaatagtgttttctgaccagatggacccaggtaccctcaaaggtatcacctcaggacaggtgaacatcaaatcctcctcatttttagaaactgacaacctgagcgctgaggtcatgcccgccttcgagagggaatacttaccccagcagctggctctcgcagacagcgatgcggaagagagtgaagatgaaagggcgcccacccccttttatacccccccgtcgggaacccccggtcacgtgtcctacacctacaagccaatcacttttctggacgcggaggagggggacatgtgcctgcacaccctggagaaggtggacccgctagtggacaacgaccgctacccctcccacgtggcctccttcgtcctggcctggacgcgggccttcgtctcagagtggtcagagtttctctacgaggaggacagaggcactccgctggaagacaggcccctgaagtcggtctacggggacacggacagcctcttcgtcaccgagaagggacaccgcctcatggagagccgaggtaagaaacgcatcaaaaagcatgggggcaacctggtttttgaccctgaccgcccggagctcacttggctggtggaatgcgagacggtctgcgctt

SEQ ID NO: 27 - DNA, 45 bp, Gorilla beringei graueri
gaggcggcggcggtagcgaccgcagagccggagaccgtagaggag

SEQ ID NO: 28 - DNA, 48 bp, Gorilla beringei graueri
actaatactgctgaagcagccattgaaaatgaagaagagctggcggat

SEQ ID NO: 29 - DNA, 48 bp, Gorilla beringei graueri
tcatggaggtggacaaatggagactacgtggggcactattttaaaaca

SEQ ID NO: 30 - DNA, 399 bp, Gorilla beringei graueri
atgagcgacaccggcaacagctttgatggaagcatctttagcccctatttgacagtgcgcatgcctcactgggctggagtgcgtcagaatgtgatgggttccaacgtggatggacgccccgttctgccttcaaattcgtctacaatggcctacgcgaccgtgggaggaactccgctggacgccgcgacctccgccgccgcctccgccgccgccgcgaccgcgcgcagcatggctacggacctttacagctctttggtggcgagcagcgcggcctctcgcgcgtctgctcgggatgagaaactgaccgctctgctgcttaaactggaagacttgacccgggagctgggtcaactgacccagcaggtctccagcttgcgtgagagcagccttgcctccccc

SEQ ID NO: 31 - DNA, 399 bp, Gorilla beringei graueri
atgagcgacaccggcaacagctttgatggaagcatctttagcccctatctgacagtgcgcatgcctcactgggctggagtgcgtcagaatgtgatgggttccaacgtggatggacgccccgttctgccttcaaattcgtctacaatggcctacgcgaccgtgggaggaactccgctggacgccgcgacctccgccgccgcctccgccgccgccgcgaccgcgcgcagcatggctacggacctttacagctctttggtggcgagcagcgcggcctctcgcgcgtctgctcgggatgagaaactgaccgctctgctgcttaaactggaagacttgacccgggagctgggtcaactgacccagcaggtctccagcttgcgtgagagcagccttgcctccccc

SEQ ID NO: 32 - DNA, 399 bp, Gorilla beringei graueri
atgagcgacaccggcaacagctttgatggaagcatctttagcccctatctgacagtgcgcatgcctcactgggctggagtgcgtcagaatgtgatgggttccaacgtggatggacgccccgttctgccttcaaattcgtctacaatggcctacgcgaccgtgggaggaactccgctggacgccgcgacctccgccgccgcctccgccgccgccgcgaccgcgcgcagcatggctacggacctttacagctctttggtggcgagcggcgcggcctctcgcgcgtctgctcgggatgagaaactgaccgctctgctgcttaaactggaagacttgacccgggagctggctcaactgacccagcaggtctccagcttgcgtgagagcagccttgcctccccc

SEQ ID NO: 33 - DNA, 3168 bp, Gorilla beringei graueri
atggacagctccaatgtgcgcgatgtcgtcatcaaactccgcccgccgagcgccgagatctggacctgcggctctcgcggcgtggtggtctgctccaccatcgccctccaggagacagatgctggcggccagacaaccaaagtagaagaccaccagccacacgggaccccaggcgggggacttagattcccgctgcgcttcctcgtcagaggtcgccaggttcacctcgtgcaagatatacaacccgtgcagcgctgccagtactgcggtcgcttttacaaaagccagcacgagtgctcggcccgcagacgggacttctactttcaccacatcaacagccaatcctccaactggtggcgggagatccagttcttcccgatcggctctcatcctcgcacggagcgcctctttgtcacctacgatgtagagacctacacttggatgggagcctttggcaagcagctcgtgcccttcatgctggtcatgaaactggggggcgacgaggctctggtcgccgccgcgcgcgacctcgcccgagagctcagatgggacccctgggagaaagaccccctcaccttctactgcatcacccccgaaaagatggccgtggggcgacagttcagaaccttccgcgaccgcctgcagaccctcatggcccgcgacctctggcgatccttcctggcggccaaccctcacttgcaagactgggccctggaggagcacggcctggaatcgcccgaggagctcacctacgaggaactcaaaaagctcccctccatcaagggccagccccgctttttggagctctacatcgtgggccacaacataaacggctttgacgagatcgtcctggccgcccaggtcatcaacaaccgctcctcggtcccagggccctttcgcatcaccagaaacttcatgcctcgagcggggaagatcctcttcaatgacctcaccttctccctgcccaacccgcgctccaaaaagcgcacggactacaccctgtgggaacagggcggctgcgatgacacagacttcaaacatcaatacctcaaagtcatggtcagggacactttcgccctcacccacacctccctccgcaaggcggcgcaggcctacgcgctgcccgtggagaagggctgttgcccctaccaggccgtcaaccagttctacatgctaggctcttaccgttcggacacggacgggtttcccctccaagagtactggaaagaccgcgaagagttcgtcctcaaccgcgagctgtggaaaaagaagggggaggataagtatgacatcatccgcgagaccctcgactactgcgcgctcgacgtccaggtcaccgccgagctggtgcacaagctgcgcgagtcctacgcctccttcgtcagggactcggtgggcttgcaagaagcaagcttcaacgtcttccagcggcccaccatctcctccaactcccatgccatcttcaggcagatcgccttccgcgccgagcgcccccagcgcaccaacctcgggcccaacatgctggccccctcccacgagctctatgactacgtgcgcgccagcatccgcggggggcgctgctaccccacctacctcggcatcctcagggaacccctgtacgtgtatgacatctgcggcatgtacgcctccgcgctcacccaccccatgccctggggcccgcccctcaacccctacgagcgcgcgctcgccgcccgcgaatggcagcgggctctggacatgcaagcttgcaagatcgactactttgacccgcgcttgctccccggggtcttcaccatcgacgcggaccccccaaacgaggaccagctggaccccctaccccccttctgctcgcgcaagggcggccgcctctgctggaccaacgagcgcctgcgcggcgaggtcgccaccagcgtcgacatggtcaccctgcacaaccgaggctggagggtgcgcctgatcccagacgagcgcaccaccgtcttccccgagtggaagtgcgtggcccgcgagtacgtgcaactcaacatcgcggccaaggagcgagccgaccgcgacaaaaaccagaccctgcgctccatcgccaagctgctctccaacgccctctacgggtcgttcgccaccaagcttgacaacaaaaaaatagtgttttctgaccagatggacccaggtaccctcaaaggtatcacctcaggacaggtgaacatcaaatcctcctcatttttagaaactgacaacctgagcgctgaggtcatgcccgccttcgagagggaatacttaccccagcagctggctctcgcagacagcgatgcggaagagagtgaagatgaaagggcgcccacccccttttatacccccccgtcgggaacccccggtcacgtgtcctacacctacaagccaatcacttttctggacgcggaggagggggacatgtgcctgcacaccctggagaaggtggacccgctagtggacaacgaccgctacccctcccacgtggcctccttcgtcctggcctggacgcgggccttcgtctcagagtggtcagagtttctctacgaggaggacagaggcactccgctggaagacaggcccctgaagtcggtctacggggacacggacagcctcttcgtcaccgagaagggacaccgcctcatggagagccgaggtaagaaacgcatcaaaaagcatgggggcaacctggtttttgaccctgaccgcccggagctcacttggctggtggaatgcgagacggtctgcgcttcctgcggcgcggacgcctactccccagagtccgtgtttctcgctcccaagctctacgccctgaagagcctgcagtgcccctcgtgcggcgccacctccaagggaaagctccgcgccaaggggcacgccgccgagggtctcgactacgagaccatggtcaaatgctacctggccgacgcgcagggcgaagagcggcagcgattcagcaccagcagaaccagcctcaagcgcaccctggccagcgcccaacccggagcgcaccccttcaccgtgacccagaccaccctgacgaggaccctgcgcccatggaaggacatgactctggccccgctggacgcccatcggctggtgccctacagcgaaagccgccccaacccgcgaaacgaggagatctgctggatcgagatgccg

SEQ ID NO: 34 - DNA, 1863 bp, Gorilla beringei graueri
atgcgacgcgcggcgatgttcgaggaggggcctcccccctcttacgagagcgcgatgggattttctcctgcgacgcccctacagcctccctacgtgcctcctcggtacctgcaacctaccgggggaagaaatagcatctgttactctgagctgcagcccctgtatgacaccaccaaagtgtacctggtggacaacaagtctgcggacgtggcctccctgaactaccagaacgaccacagcgattttttgaccaccgtgatccaaaacaatgacttcaccccaaacgaggccagcacccagaccataaacctggacaacaggtcgcactggggcggtgatctgaagaccatcttgcacaccaacatgcccaacgtgaatgagtttatgtttactaactcttttaaggcgcgggtaatggtggcgcgcgacgataagggagtgcctaaatacgagtgggtggactttacactgcccgagggcaactactccgagatcatgactcttgacctgatgaacaacgcgatcgtggagcactacttgaaagtaggcaggcagaacggggtaaaagaaagcgatattggagttaagtttgacaccaggaactttcgcctgggatgggaccccgagacggggttggttatgcccggggtttacactaatgaagcttttcaccccgatatagtgctcttgcccggatgcggggtggacttcacccaaagccggctgagcaacctgctgggcattcgaaagcgccagccattccaggaggggtttcaaatcacttatgagcatttggaagggggcaacattccggcgcttctggatttggtcgcctacgaggagagtttgaaatccgaggaaagcggggataacactgacaagggcggcgaggagcaagccggcgatggcgacactgcttcggtagaaaacgaaagtgcgtccgtggtggaggcggcggcggtagcgaccgcagagccggagaccgtagaggaggatatgaatgatagcgcaatcagaggagactcgtttattccccggggcgaagaaaagaaggcggaggctgcggcagcagtcgaagcagagcccaaagtcgagtcggagatcatggaggaggatttgaatgataacgcgatcagaggtgatacgtttgtgccgcggggcgaagaaaaaaaagcggaggcggaggccgcggctgaggaggcggccgaggctgtggcagccaccgcggcggtgactgaaacaactgaggagcaggttcaggccgagcaggttcaaaagaagcccgtgattaaagccctaacacaagatagcaaggagcgcagttacaacttgattcccggtagtactgacaccgagtaccgcagctggtacctggcatacaactacggcgacccggtcaaaggggtgcgctcgtggactctgctttgcacgccggacgtcacctgcggctccgagcagatgtactggtcgttgccaaacatgatgcaagacccggtgaccttccgctccacgcggcaggttaacaacttcccggtggtgggcgccgaactgctgcccgtgcactccaagagcttttacaacgagcaggccgtgtactcccagctgatccgccaggccacctctctgacccacgtgttcaatcgctttcccgagaaccagattttggcgcgcccgccggcccccaccatcactaccgtcagtgaaaacgttcctgctctcacagatcacgggacgctaccgctgcgcaacagcatctcaggagtccagcgagtgaccattactgacgccagacgccggacctgcccctacgtttacaaggccttgggcatagtctcgccgcgcgtcctctccagccgcactttt

SEQ ID NO: 35 - DNA, 2841 bp, Gorilla beringei graueri
atggcgaccccttcgatgatgccacagtggtcgtacatgcacatctcgggccaggacgcctcggagtacctgagccccgggctggtgcagttcgcccgcgccaccgacagctacttcagcctaagtaacaaatttaggaaccctacggtggcacccacccacgatgtgaccacggaccggtcgcagcgcctgacgctgcggtttatccccgtggatcgggaggacactgcctactcttacaaggcgcgcttcacgctagccgtgggcgacaaccgcgtgctggacatggcctccacctactttgatatccggggtgtgctggacaggggtcccacctttaagccctactcgggcactgcctacaactccctggctcctaaaggcgctcccaattcttgcgagtgggatgaaaaaactaatactgctgaagcagccattgaaaatgaagaagagctggcggatgagccagaagagcaagcagaagaggctataaaaaccaatgtgtttgcccaggcgccatattctggcaatgcaatttccaaagaaggaatacaagtaggcatagaaggcattggagagcaagtaaaagccgtatacgcagacaaaacctaccagccggaacctcaggttggagaaactcaatggaatgagactgaaataaatcatggagcaggaagggtgctgaagaagaccactcccatgaagccttgctatggttcttatgctaaacctactaatgaatatggaggccagggcatccttgtagaaaaaaatggcaaaatggaaagccaggtggaaacacagttttttgctcttgacggtgaaaatgataatagtccaaaagtggtgttgtatagcgaagatgtaaacttggatactcctgacacacacctatcatacaaacctagcgcccaagatgtaaactctaaagaaatgttgggccaacaggccatgcccaacaggccaaatcttattgcttttagggacaactttattggacttatgtactacaacagcactggcaacatgggagtgctggcaggacaggcctcccaactaaatgccgtggtagacttgcaagacagaaacacagagttgtcataccagctgatgcttgattccattggagacagatcaagatattttgccatgtggaaccaggcggttgatagttacgatccagatgttagaattattgaaaaccatggcacagaggatgaacttccaaactactgttttcctttgggaggaatatttaatactcagagttttaaaaaggtaaaacctggaacggataacggatgggaaacagatgatgacttttcagataaaaatgaaataagagttggcaacaactttgccatggagatcaatatccaggcaaacctgtggagaagcttcttgtattccaatgtggctctctacctgccagataagatgaagtactctccaaccaacatagacatttccaccaacactaacacctatgactacatgaacaaaagagtggcgcctccaggcctggtggactgctatgtcaatctgggggccaggtggtcccttgatgtaatggataacatgaacccctttaaccaccaccgcaatgcgggcctgcgataccgttccatgcttctgggtaacggccgctacgtgcccttccacatccaggtgccccaaaagttctttgccatcaaaagccttctactcttgcctggctcgtacacctacgaatggaatttcagaaaggatgtgaacatggtcctacagagctctctgggcaacgaccttagggtggatggggccagcatcaagtttgacagcatcaccctttatgctacctttttccccatggcccacaacaccgcttccacgcttgaggccatgctcagaaacgacaccaacgaccagtccttcaatgactacctctctggggccaacatgctctaccccatccccgccaacgctaccaacgtgcccatctccattccctctcgcaactgggccgccttcagaggctgggcatttacccgccttaagaccaaggagaccccctccctgggctcgggttttgacccctactttgtctactcgggatccatcccctacctggatggcaccttctacctcaaccacacttttaagaagatatccatcatgtatgactcctctgtcagctggccgggcaacgaccgcctgctcacccccaatgagttcgaggtcaagcgcgccgtggacggcgagggctacaacgtggcccagtgcaacatgaccaaggactggttcctggtgcagatgctggccaactacaacataggctaccagggcttctacatcccagagagctacaaggacaggatgtactccttcttcagaaatttccaacccatgagcaggcaggtggtggacgagaccaaatacaaggactatcaggccgttggcatcactcaccagcacaacaactcgggattcgtgggctacctggcacccaccatgcgcgagggacaggcctaccccgccaacttcccctaccccttgataggcaagaccgcggtcgacagcgtcacccagaaaaagttcctctgcgaccgcaccctctggcgcatccccttttctagcaacttcatgtccatgggcgcgctcacggacctgggccagaacctgctctatgccaactccgcccatgcgctggacatgacttttgaggtggaccccatggacgagcccacccttctctatattgtgtttgaagtgttcgacgtggtcagagtgcaccagccgcaccgcggtgtcatcgagaccgtgtacctgcgcacgcccttctcggccggcaacgccaccacc

SEQ ID NO: 36 - DNA, 1740 bp, Gorilla beringei graueri
atgaaacgcgcgagatcgtctgacgagaccttcaaccccgtgtacccctacgataccgagatcgctccgacttctgtcccttttcccacccctccctttgtgtcccccgcaggaatgcaagaaaacccccctggagtgctatccctacgccttgcagaacccttgaccacctccaatggagcgctgaccctaaaaatggggggtggtttgaccctggacgaagaaggaaagcttacttcccaaaatattaccagtgttgatcctcctcttaaaaaaacaaaaaacaatatcagtctgcagactgcctccccccttgccgtcagctcgggagccctcacacttttcgctactcctcccctggcagttaatgacaataacctaactgtgcagtctcaggctccccttacactggaaaactcaaaactaagtctggccaccaaaggccccctaaccgtttctgaaggaaaacttgccctagaaacagaggctcccttgcatgcaagcgacagcagtagcctaggccttagtgtaacggccccactgagcattagcagcgacagcctaggactagacttgcaagcgcccattatttctgaaaatggaaaactgggcctaagagtaacaggtcccctaactgtggccagcagtattgatgctttgacagtagccacaggcagcggtattggacttgatagcaacacgcgcctacaggcaaaattggtcgcgcccctaggctttgacaccaatggcaacattaagctcagcacttcgggcggcatgagactgaacaatggcacacttatactagatgtaaactacccatttgaggctcaaggtcaacttagtctaagagtgggttcgggtccactgtatgtagactccaacacacataacctaaccgctagatgccttagagggctatacataacgtcatctaataaccaaaccggcctggaggccaacataaaacttacaaaaggacttgtgtttgatggaaatgccatagcagttaatgttagcaaagggctagaatacagtaccactgaaacagcgcagggtgtaaatcccatacagactaaaataggtttgggcatggaatatgataccaatggagccataaagccaagactaggctctggtttgagctttgataattcaggagctattgtagtgggaaacaaaaatgatgacactcttactctgtggactacaccagacccatctcccaactgtcagattaactcggaaaaagatgctaaactaaccttggtactaaccaagtgcggtagtcaaattgtaggcacagtatctgcctttgctcttaaaggcagccttgccccaattaatggcacagtgagctcagttagtatattcctaagatttaatgaaaatggggtactgatgagcaactcatcgttggaaagccaatactggaattacaggaatggaaattcaactaatgccacaccatatacaaatgcactaggttttatgcctaacctggcagcttatcccaaaggccaggcaacgactgcaaaaagcagcatcattagccaggtttacatgaatggtgacacttccaaacctatgatatttacaataacttttaatgggcttgaaacagaggaaactcaggtcagtacatattccatgacattttcatggaggtggacaaatggagactacgtggggcactattttaaaacaaactcctttactttctcctacattgcccaagaa

SEQ ID NO: 37 - protein, 429 aa, Gorilla beringei graueri
AFRAERPQRTNLGPNMLAPSHELYDYVRASIRGGRCYPTYLGILREPLYVYDICGMYASALTHPMPWGPPLNPYERALAAREWQRALDMQACKIDYFDPRLLPGVFTIDADPPNEDQLDPLPPFCSRKGGRLCWTNERLRGEVATSVDMVTLHNRGWRVRLIPDERTTVFPEWKCVAREYVQLNIAAKERADRDKNQTLRSIAKLLSNALYGSFATKLDNKKIVFSDQMDPGTLKGITSGQVNIKSSSFLETDNLSAEVMPAFEREYLPQQLALADSDAEESEDERAPTPFYTPPSGTPGHVSYTYKPITFLDAEEGDMCLHTLEKVDPLVDNDRYPSHVASFVLAWTRAFVSEWSEFLYEEDRGTPLEDRPLKSVYGDTDSLFVTEKGHRLMESRGKKRIKKHGGNLVFDPDRPELTWLVECETVCAS

SEQ ID NO: 38 - protein, 15 aa, Gorilla beringei graueri
EAAAVATAEPETVEE

SEQ ID NO: 39 - protein, 16 aa, Gorilla beringei graueri
TNTAEAAIENEEELAD

SEQ ID NO: 40 - protein, 16 aa, Gorilla beringei graueri
SWRWTNGDYVGHYFKT

SEQ ID NO: 41 - protein, 133 aa, Gorilla beringei graueri
MSDTGNSFDGSIFSPYLTVRMPHWAGVRQNVMGSNVDGRPVLPSNSSTMAYATVGGTPLDAATSAAASAAAATARSMATDLYSSLVASSAASRASARDEKLTALLLKLEDLTRELGQLTQQVSSLRESSLASP

SEQ ID NO: 42 - protein, 133 aa, Gorilla beringei graueri
MSDTGNSFDGSIFSPYLTVRMPHWAGVRQNVMGSNVDGRPVLPSNSSTMAYATVGGTPLDAATSAAASAAAATARSMATDLYSSLVASGAASRASARDEKLTALLLKLEDLTRELAQLTQQVSSLRESSLASP

SEQ ID NO: 43 - protein, 1056 aa, Gorilla beringei graueri; identical to SEQ ID NO: 17

SEQ ID NO: 44 - protein, 621 aa, Gorilla beringei graueri
MRRAAMFEEGPPPSYESAMGFSPATPLQPPYVPPRYLQPTGGRNSICYSELQPLYDTTKVYLVDNKSADVASLNYQNDHSDFLTTVIQNNDFTPNEASTQTINLDNRSHWGGDLKTILHTNMPNVNEFMFTNSFKARVMVARDDKGVPKYEWVDFTLPEGNYSEIMTLDLMNNAIVEHYLKVGRQNGVKESDIGVKFDTRNFRLGWDPETGLVMPGVYTNEAFHPDIVLLPGCGVDFTQSRLSNLLGIRKRQPFQEGFQITYEHLEGGNIPALLDLVAYEESLKSEESGDNTDKGGEEQAGDGDTASVENESASVVEAAAVATAEPETVEEDMNDSAIRGDSFIPRGEEKKAEAAAAVEAEPKVESEIMEEDLNDNAIRGDTFVPRGEEKKAEAEAAAEEAAEAVAATAAVTETTEEQVQAEQVQKKPVIKALTQDSKERSYNLIPGSTDTEYRSWYLAYNYGDPVKGVRSWTLLCTPDVTCGSEQMYWSLPNMMQDPVTFRSTRQVNNFPVVGAELLPVHSKSFYNEQAVYSQLIRQATSLTHVFNRFPENQILARPPAPTITTVSENVPALTDHGTLPLRNSISGVQRVTITDARRRTCPYVYKALGIVSPRVLSSRTF

SEQ ID NO: 45 - protein, 947 aa, Gorilla beringei graueri
MATPSMMPQWSYMHISGQDASEYLSPGLVQFARATDSYFSLSNKFRNPTVAPTHDVTTDRSQRLTLRFIPVDREDTAYSYKARFTLAVGDNRVLDMASTYFDIRGVLDRGPTFKPYSGTAYNSLAPKGAPNSCEWDEKTNTAEAAIENEEELADEPEEQAEEAIKTNVFAQAPYSGNAISKEGIQVGIEGIGEQVKAVYADKTYQPEPQVGETQWNETEINHGAGRVLKKTTPMKPCYGSYAKPTNEYGGQGILVEKNGKMESQVETQFFALDGENDNSPKVVLYSEDVNLDTPDTHLSYKPSAQDVNSKEMLGQQAMPNRPNLIAFRDNFIGLMYYNSTGNMGVLAGQASQLNAVVDLQDRNTELSYQLMLDSIGDRSRYFAMWNQAVDSYDPDVRIIENHGTEDELPNYCFPLGGIFNTQSFKKVKPGTDNGWETDDDFSDKNEIRVGNNFAMEINIQANLWRSFLYSNVALYLPDKMKYSPTNIDISTNTNTYDYMNKRVAPPGLVDCYVNLGARWSLDVMDNMNPFNHHRNAGLRYRSMLLGNGRYVPFHIQVPQKFFAIKSLLLLPGSYTYEWNFRKDVNMVLQSSLGNDLRVDGASIKFDSITLYATFFPMAHNTASTLEAMLRNDTNDQSFNDYLSGANMLYPIPANATNVPISIPSRNWAAFRGWAFTRLKTKETPSLGSGFDPYFVYSGSIPYLDGTFYLNHTFKKISIMYDSSVSWPGNDRLLTPNEFEVKRAVDGEGYNVAQCNMTKDWFLVQMLANYNIGYQGFYIPESYKDRMYSFFRNFQPMSRQVVDETKYKDYQAVGITHQHNNSGFVGYLAPTMREGQAYPANFPYPLIGKTAVDSVTQKKFLCDRTLWRIPFSSNFMSMGALTDLGQNLLYANSAHALDMTFEVDPMDEPTLLYIVFEVFDVVRVHQPHRGVIETVYLRTPFSAGNATT

SEQ ID NO: 46 - protein, 580 aa, Gorilla beringei graueri
MKRARSSDETFNPVYPYDTEIAPTSVPFPTPPFVSPAGMQENPPGVLSLRLAEPLTTSNGALTLKMGGGLTLDEEGKLTSQNITSVDPPLKKTKNNISLQTASPLAVSSGALTLFATPPLAVNDNNLTVQSQAPLTLENSKLSLATKGPLTVSEGKLALETEAPLHASDSSSLGLSVTAPLSISSDSLGLDLQAPIISENGKLGLRVTGPLTVASSIDALTVATGSGIGLDSNTRLQAKLVAPLGFDTNGNIKLSTSGGMRLNNGTLILDVNYPFEAQGQLSLRVGSGPLYVDSNTHNLTARCLRGLYITSSNNQTGLEANIKLTKGLVFDGNAIAVNVSKGLEYSTTETAQGVNPIQTKIGLGMEYDTNGAIKPRLGSGLSFDNSGAIVVGNKNDDTLTLWTTPDPSPNCQINSEKDAKLTLVLTKCGSQIVGTVSAFALKGSLAPINGTVSSVSIFLRFNENGVLMSNSSLESQYWNYRNGNSTNATPYTNALGFMPNLAAYPKGQATTAKSSIISQVYMNGDTSKPMIFTITFNGLETEETQVSTYSMTFSWRWTNGDYVGHYFKTNSFTFSYIAQE

SEQ ID NO: 47 - DNA, 37073 bp, Gorilla beringei graueri
catcatcaataatataccttattttggattgtggccaatatgataatgaggtgggcggggagaggcggggcgggtgacgtaggacgcgcgagtagggttgggaggtgtggcggaagtgtggcatttgcaagtgggaggagctcacatgcaagcttccgtcgcggaaaatgtgacgtttttgatgagcgccgcctacctccggaagtgccaattttcgcgcgcttttcaccggatatcgtagtaattttgggcgggaccatgtaagatttggccattttcgcgcgaaaagtgaaacggggaagtgaaaactgaataatagggcgttagtcatagcgcgtaatatttaccgagggccgagggactttgaccgattacgtggaggactcgcccaggtgttttttacgtgaatttccgcgttccgggtcaaagtctccgtttttattgtcaccgtcatttgacgcggagggtatttaaacccgctgcgctcctcaagaggccactcttgagtgccagcgagaagagttttctcctctgctccgcttcggtgatcgaaaaatgagacacatagcctgcactccgggtcttttgtccggtcgggcggcggccgagcttttggacgctttgatcaatgatgtcctgagcgatgattttccgtctactacccactttagcccacctactcttcacgaactgtacgatctggatgtactggtggatgtgaacgatcccaacgaggaggcggtttctgcgttttttcccgagtctgcgctgttggccgctcaggagggatttgacctacacactccgccgcctattttagagtctccgctgccggagcccagtggtataccttatatgcctgaactgcttcccgaagtggtagacctgacctgccacgagcctggctttccgcccagcgacgatgatggtgagccttttgttttagactttgctgagatacctgggcacggttgcaggtcttgtgcatatcatcagagggttaccggagaccccgaggttaagtgttcgctgtgctatatgaggatgacctcttcctttatctacagtaagtttttgtctaggtgggcttttgggtaggtgggttttgtgtcagaacaggtgtaaacgttgcttgtgttttttgtacctgtaggtccggtgtccgagccagacccggagcccgaccgcgatcccgagccggatcccgagcctcctcgcaggacaaggaaactaccttccattctgtgcaagtctcagacacctgtaaggaccagcgaggcagacagcaccgactctggcacttctacctctccccctgaaattcacccagtggttcctctgggtatacataaacctgttgctgttagagtttgcgggcgacgccctgcagtacagtgcattgaggacttgcttcacgatcccgaggaacctttggacttgagccttaaacgccctaggcaataaaccccacctaagtaataaaccccacctaagtaataaaccctgccgcccttggttattgagatgacgcccaatgtttgcttttgaatgacttcatgtgtgtaataaaagtgagtgtgatcataggtctcttgtttgtctgggcggggcttaagggtatataagtttctcggggctaaacttggttacacttgaccccaatggaggcgtgggggtgcttggaggagtttgcggacgtgcgccgtttgctggacgagagctctaaccatacctatactatttggaggtatctgtggggctctactcaggccaagttggtctccagaattaagcaggattacaagtgcgattttgaagagctttttagttcctgcggtgagcttttgcaatccttgaatctgggccatcaggctattttccaggaaaaggttctctcgactttggatttttccactcccgggcgcaccgccgcttgtgtggcttttgtgtcttttgtgcaagataaatggagcgaggagacccacctgagtcacggctacgtactggatttcatggcgatggctctttggagggctcacaacaaatggaagattcagaaggaactgtacggttccgccctacgtcgtccacttttgtcgcgacaggggctgaggtttcccgaccatcggcagcatcagaatctggaagacgagtcggaggagcgagcggaggagaagatcagcttgagagccggcctggaccctcctcaggaggaatgaatctcccgcaggtggttgacctgtttccagaactgagacgggtcctgactatcagggaggatggtcagtttgtgaagaagtttaagagggatcggggtgagggagatgatgaggcggctagcaatttagcttttagtctgatgactcgccaccgaccggaatgtattacctatcagcagattaaggagagttgtgccaacgagctggatcttttgggtcagaagtatagcatagaacagcttaccacttactggcttcagcctggggatgattgggaagaggcgatcagggtgtatgcaaaggtggccctgcggcccgattgcaagtataagattactaagttggttaatattagaaactgctgctatatttctgggaacggggccgaagtggagatagatactcaggacagggtggcttttaggtgttgcatgataaacatgtggcccgggatactggggatggatggggtggtgttcatgaatgtgaggtttacgggccccaactttaatggcacggtgttcatgggcaacaccaacttgctcctgcatggtgcgagtttctatgggtttaataacacctgtatagaggcctggaccgatgtaaaggttcgaggttgttccttttatagctgttggaaggcggtggtgtgtcgccctaaaagcaggggttctgtgaaaaaatgcttgtttgaaaggtgcaccttaggcatcctctctgagggcaactccagggtgcgccataatgtggcttcgaactgcggttgcttcatgcaagtgaagggggtgagcgttatcaagcataactcggtgtgtggaaactgcgaggatcgcgcctcccagatgctgacctgctttgatggtaactgtcacctgttgaagaccattcatataagcagccaccccagaaaggcctggcccgtgtttgagcataacatcctgacccgctgctccttgcatctgggggtcaggaggggtatgttcctgccttaccagtgtaactttagccacactaaaatcctgctggaacccgagtgtatgaccaaggtcagcctaaatggcgtgtttgatgcgactctgagaatctggaaggtgctgaggtatgatgagaccaggaccaggtgccgaccctgcgagtgcggcggcaagcacatgagaaatcagcctgtgatgttggatgtgaccgaggagcttaggcctgaccatctggtgctggcctgtaccagggccgagtttgggtctagcgatgaggataccgattgaggtgggtaaggtgggcgtggctagcagggtggggcgtgtataaattgggggtctaagggtctctctgttttgtcttgcaacagccgccgccatgagcgacaccggcaacagctttgatggaagcatctttagcccctatttgacagtgcgcatgcctcactgggctggagtgcgtcagaatgtgatgggttccaacgtggatggacgccccgttctgccttcaaattcgtctacaatggcctacgcgaccgtgggaggaactccgctggacgccgcgacctccgccgccgcctccgccgccgccgcgaccgcgcgcagcatggctacggacctttacagctctttggtggcgagcagcgcggcctctcgcgcgtctgctcgggatgagaaactgaccgctctgctgcttaaactggaagacttgacccgggagctgggtcaactgacccagcaggtctccagcttgcgtgagagcagccttgcctccccctaatggcccataatataaataaaagccagtctgtttggattaagcaagtgtatgttctttatttaactctccgcgcgcggtaagcccgggaccagcggtctcggtcgtttagggtgcggtggattctttccaacacgtggtacaggtggctctggatgtttagatacatgggcatgagtccatccctggggtggaggtagcaccactgcagagcttcgtgctcgggggtggtgttgtatatgatccagtcgtagcaggagcgctgggcgtggtgctgaaaaatgtccttaagcaagaggcttatagctagggggaggcccttggtgtaagtgtttacaaatctgctcagttgggaggggtgcatccggggggatataatgtgcatcttggactggatttttaggttggctatgttcccacccagatcccttctgggattcatgttgtgcaggaccaccagcacggtatatccagtgcacttgggaaatttatcgtggagcttagacgggaatgcatggaagaacttggagacgcccttgtggcctcccagattttccatacattcgtccatgatgatggcaatgggcccgtgggaagctgcctgagcaaaaatgtttctgggatcgctcacatcgtagttatgttccagggtgaggtcatcataagacatctttacaaatcgggggcggagggtcccggactggggtatgatggtaccctcgggccccggggcgtagttcccctcacagatctgcatctcccaggctttcatttcagagggagggatcatatccacctgcggagcgatgaaaaacacagtttctggcgcaggggagattaactgggatgagagcaggtttctgagcagctgtgactttccacagccggtgggcccatatatcacgcctatcaccggctgcagctggtagttaagagagctgcagctgccgtcctcccggagcaggggggccacctcgttcagcatatccctgacgtggatgttctccctgaccaattccgccagaaggcgctcgccgcccagcgaaagcagctcttgcaaggaagcaaaatttttcagcggttttaggccgtcggccgtgggcatgtttttcagcgtctgggtcagcagttccagcctgtcccacagctcggtgatgtgctctacggcatctcgatccagcagatctcctcgtttcgcgggttggggcggctttcgctgtagggcaccagccgatgggcgtccagcggggccagagtcatgtccttccatgggcgcagggtcctcgtcagggtggtctgggtcacggtgaaggggtgcgctccgggttgggcgctggccagggtgcgcttgaggctggttctgctggtgctgaatcgctgccgctcttcgccctgcgcgtcggccaggtagcatttgaccatggtctcgtagtcgagaccctcggcggcgtgccccttggcgcggagctttcccttggaggtggcgccgcacgaggggcactgcaggctcttcagggcgtagagcttgggagcgagaaacacggactctggggagtaggcgtccgcgccgcaggaagcgcagaccgtctcgcattccaccagccaagtgagctccgggcggtcagggtcaaaaaccaggttgcccccatgctttttgatgcgtttcttacctcggctctccatgaggcggtgtcccttctcggtgacgaagaggctgtccgtgtccccgtagaccgacttcaggggcctgtcttccagcggagtgcctctgtcctcctcgtagagaaactctgaccactctgagacgaaggcccgcgtccaggccaggacgaaggaggccacgtgggaggggtagcggtcgttgtccactagcgggtccaccttctccagggtgtgcaggcacatgtccccctcctccgcgtccagaaaagtgattggcttgtaggtgtaggacacgtgaccgggggttcccgacgggggggtataaaagggggtgggcgccctttcatcttcactctcttccgcatcgctgtctgcgagagccagctgctggggtaagtattccctctcgaaggcgggcatgacctcagcgctcaggttgtcagtttctaaaaatgaggaggatttgatgttcacctgtcctgaggtgatacctttgagggtacctgggtccatctggtcagaaaacactatttttttgttgtcaagcttggtggcgaacgacccgtagagggcgttggagagcagcttggcgatggagcgcagggtctggtttttgtcgcggtcggctcgctccttggccgcgatgttgagttgcacgtactcgcgggccacgcacttccactcggggaagacggtggtgcgctcgtctgggatcaggcgcaccctccagcctcggttgtgcagggtgaccatgtcgacgctggtggcgacctcgccgcgcaggcgctcgttggtccagcagaggcggccgcccttgcgcgagcagaaggggggtagggggtccagctggtcctcgtttggggggtccgcgtcgatggtgaagaccccggggagcaagcgcgggtcaaagtagtcgatcttgcaagcttgcatgtccagagcccgctgccattcgcgggcggcgagcgcgcgctcgtaggggttgaggggcgggccccagggcatggggtgggtgagcgcggaggcgtacatgccgcagatgtcatacacgtacaggggttccctgaggatgccgaggtaggtggggtagcagcgccccccgcggatgctggcgcgcacgtagtcatagagctcgtgggagggggccagcatgttgggcccgaggttggtgcgctgggggcgctcggcgcggaaggcgatctgcctgaagatggcatgggagttggaggagatggtgggccgctggaagacgttgaagcttgcttcttgcaagcccaccgagtccctgacgaaggaggcgtaggactcgcgcagcttgtgcaccagctcggcggtgacctggacgtcgagcgcgcagtagtcgagggtctcgcggatgatgtcatacttatcctcccccttctttttccacagctcgcggttgaggacgaactcttcgcggtctttccagtactcttggaggggaaacccgtccgtgtccgaacggtaagagcctagcatgtagaactggttgacggcctggtaggggcaacagcccttctccacgggcagcgcgtaggcctgcgccgccttgcggagggaggtgtgggtgagggcgaaagtgtccctgaccatgactttgaggtattgatgtttgaagtctgtgtcatcgcagccgccctgttcccacagggtgtagtccgtgcgctttttggagcgcgggttgggcagggagaaggtgaggtcattgaagaggatcttccccgctcgaggcatgaagtttctggtgatgcgaaagggccctgggaccgaggagcggttgttgatgacctgggcggccaggacgatctcgtcaaagccgtttatgttgtggcccacgatgtagagctccaaaaagcggggctggcccttgatggaggggagctttttgagttcctcgtaggtgagctcctcgggcgattccaggccgtgctcctccagggcccagtcttgcaagtgagggttggccgccaggaaggatcgccagaggtcgcgggccatgagggtctgcaggcggtcgcggaaggttctgaactgtcgccccacggccatcttttcgggggtgatgcagtagaaggtgagggggtctttctcccaggggtcccatctgagctctcgggcgaggtcgcgcgcggcggcgaccagagcctcgtcgccccccagtttcatgaccagcatgaagggcacgagctgcttgccaaaggctcccatccaagtgtaggtctctacatcgtaggtgacaaagaggcgctccgtgcgaggatgagagccgatcgggaagaactggatctcccgccaccagttggaggattggctgttgatgtggtgaaagtagaagtcccgtctgcgggccgagcactcgtgctggcttttgtaaaagcgaccgcagtactggcagcgctgcacgggttgtatatcttgcacgaggtgaacctggcgacctctgacgaggaagcgcagcgggaatctaagtcccccgcctggggtcccgtgtggctggtggtcttctactttggttgtctggccgccagcatctgtctcctggagggcgatggtggagcagaccaccacgccgcgagagccgcaggtccagatctcggcgctcggcgggcggagtttgatgacgacatcgcgcacattggagctgtccatggtctccagctcccgcggcggcaggtcagctgggagttcctggaggttcacctcgcagagacgggtcaaggcgcgggcagtgttgagatggtatctgatttcaaggggcgtgttggcggcggagtcgatggcttgcaggaggccgcagccccggggggccacgatggttccccgcggggcgcgaggggaggcggaagctgggggtgtgttcagaagcggtgacgcgggcgggcccccggaggtagggggggttccggccccacgggcatgggcggcaggggcacgtcttcgccgcgcgcgggcaggggctggtgctggctccgaagagcgcttgcgtgcgcgacgacgcgacggttggtgtcctgtatctggcgcctctgagtgaagaccacgggtcccgtgaccttgaacctgaaagagagttcgacagaatcaatctcggcatcgttgacagcggcctggcgcaggatctcctgcacgtcgcccgagttgtcctggtaggcgatctctgccatgaactgctcgatctcttcctcctggagatctcctcgtccggcgcgctccacggtggccgccaggtcgttggagatgcgacccatgagctgcgagaaggcgttgagcccgccctcgttccagacccggctgtagaccacgcccccctcggcgtcgcgggcgcgcatgaccacctgggccaggttgagctccacgtgtcgcgtgaagacggcgtagttgcgcaggcgctggaaaaggtagttcagggtggtggcggtgtgctcggcgacgaagaagtacatgacccagcgccgcaacgtggattcattgatgtcccccaaggcctccaggcgctccatggcctcgtagaagtccacggcgaagttgaaaaactgggagttgcgagcggacacggtcaactcctcctccagaagacggatgagctcggcgacagtgtcgcgcacctcgcgctcgaaggccacggggggcgcttcttcctcttccacctcttcttccatgatcgcttcttcttcttcctcagccgggacgggagggggcggcggcggcgggggaggggcgcggcggcggcggcggcgcaccgggaggcggtcgatgaagcgctcgatcatctccccccgcatgcggcgcatggtctcggtgacggcgcggccgttctcccgggggcgcagctcgaagacgccgcctctcatctcgccgcggggcgggcggccgtgaggtagcgagacggcgctgactatgcatcttaacaattgctgtgtaggtacgccgccgagggacctgattgagtccagatccaccggatccgaaaacctttggaggaaagcgtctatccagtcgcagtcgcaaggtaggctgagcaccgtggcgggcgggggcgggtctggagagttcctggcggagatgctgctgatgatgtaattaaagtaggcggtcttgagaaggcggatggtggacaggagcaccatgtctttgggtccggcctgttggatgcggaggcggtcggccatgccccaggcctcgttctgacaccggcgcaggtctttgtagtagtcttgcatgagtctttccaccggcacctcttctccttcctcttctccatctcgccggtggtttctcgcgccgcccatgcgcgtgaccccaaagcccctgagcggctgcagcagggccaggtcggcgaccacgcgctcggccaagatggcctgctgcacctgagtgagggtcctctcgaagtcatccatgtccacgaagcggtggtaggcgcccgtgttgatggtgtaggtgcagttggccatgacggaccagttgacggtctggtgtcccggctgcgagagctccgtgtaccgcaggcgcgagaaggcgcgggaatcgaacacgtagtcgttgcaagtccgcaccagatactggtagcccaccaggaagtgcggcggaggttggcgatagaggggccagcgctgggtggcgggggcgccgggcgccaggtcttccagcataaggcggtggtatccgtagatgtacctggacatccaggtgatgccggcggcggtggtggtggcgcgcgcgtagtcgcggacccggttccagatgtttcgcaggggcaagaagtgttccatggtcggcacgctctggccggtgaggcgcgcgcagtcgttgacgctctatacacacacaaaaacgaaagcgtttacagggctttcgttctgtagcctggaggaaagtaaatgggttgggttgcggtgtgccccggttcgagaccaagctgagctcggccggctgaagccgcagctaacgtggtattggcagtcccgtctcgacccaggccctgtatcctccaggatacggtcgagagcccttttgctttcttggccaagcgcccgtggcgcgatctgggatagatggtcgcgatgagaggacaaaagcggctcgcttccgtagtctggagaaacaatcgccagggttgcgttgcggcgtaccccggttcgagcccctatggcggcttggatcggccggaaccgcggctaacgagggccgtggcagccccgtcctcaggaccccgccagccgacttctccagttacgggagcgagccccttttgtttttttattttttagatgcatcccgtgctgcggcagatgcgcccctcgccccggcccgatcagcagcagcaacagcaggcatgcagacccccctctcccctttccgccccggtcaccacggccgcggcggccgtgtcgggcgcggggggcgcgctggagtcagatgagccaccgcggcggcgacctaggcagtatctggacttggaagagggcgagggactggcgcggctgggggcgaactctccagagcgccacccgcgggtgcagttgaaaagggacgcgcgcgaggcgtacctgccgcggcagaacctgtttcgcgaccgcgggggcgaggagcccgaggagatgcgagactgcaggttccaagcggggcgcgagctgcggcgcgggctggacagacagcgcctgctgcgcgaggaggactttgagcccgacacgcagacgggcatcagccccgcgcgcgcgcacgtagccgcggccgacctggtgaccgcctacgagcagacggtgaaccaggagcgcaacttccaaaagagcttcaacaaccacgtgcgcacgctggtggcgcgcgaggaggtgaccctgggtctcatgcatctgtgggacctggtggaggcgatcgtgcagaaccccagcagcaagcccctgaccgcgcagctgttcctggtggtgcagcacagcagggacaacgaggccttcagggaggcgctgctgaacatcaccgagccggaggggcgctggctcctggacctgataaacatcctgcagagcatagtggtgcaggagcgcagcctgagcctggccgagaaggtggcggccatcaactactctatgctgagcctgggcaagttctacgcccgcaagatctacaagaccccctacgtgcccatagacaaggaggtgaagatagacagcttctacatgcgcatggcgctgaaggtgctgaccctgagcgacgacctgggagtgtaccgcaacgagcgcatccacaaggccgtgagcgccagccggcggcgcgagctgagcgaccgcgagctgatgcacagtctgcagcgcgcgctgaccggcgcgggcgagggcgacagggaggtcgagtcctacttcgacatgggggccgacctgcactggcagccgagccgccgcgccctggaggcggcgggggcgtacggcggccccctggcggacgatgaccaggaagaggaggactatgagctagaggagggcgagtacctggaggactgacctggctggtggtgttttggtatagatgcaagatccgaacgtggcggacccggcggtccgggcggcgctgcagagccagccgtccggcattaactcctctgacgactgggccgcggccatgagtcgcatcatggccctgaccgcgcgcaaccccgaggctttcaggcagcagcctcaggccaaccggctggcggccatcttggaagcggtagtgcccgcgcgctccaaccccacccacgagaaggtgctggccatagtcaacgcgctggcggagagcagggccatccgcgcggacgaggccggactggtgtacgatgcgctgctgcagcgggtggcgcggtacaacagcggcaacgtgcagaccaacctggaccgcctggtgacggatgtgcgcgaggccgtggcgcagcgcgagcgcttgcatcaggacggtaacctgggctcgctggtggcgctaaacgccttcctcagcacccagccggccaacgtaccgcgggggcaggaggactacaccaactttttgagcgcgctgcggctgatggtgaccgaggtccctcagagcgaggtgtaccagtcggggcccgactacttcttccagaccagcagacagggcttgcaaaccgtgaacctgagccaggctttgaagaacctgcgggggctgtggggagtgaaggcgcccaccggcgaccgggctacggtgtccagcctgctaacccccaactcgcgcctgctgctgctgctgatcgcgcccttcacggacagcgggagcgtctcgcgggaaacctatctgggccacctgctgacgctgtaccgcgaggccatcgggcaggcgcaggtggacgagcacaccttccaagagatcaccagcgtgagccacgcgctggggcaggaggacacgggcagcctgcaggcgaccctgaactacctgctgaccaacaggcggcagaagattcccacgctgcacagcctgacgcaggaggaggagcgcatcttgcgctacgtgcagcagagcgtgagcctgaacctgatgcgcgacggcgtgacgcccagcgtggcgctggacatgaccgcgcgcaacatggaaccgggcatgtacgcctcccaccggccgttcattaaccgcctgatggactacttgcatcgggcggcggccgtgaaccccgagtacttcactaatgccattctgaatccccactggatgccccctccgggtttctacaacggggacttcgaggtgcccgaggttaacgacgggttcctctgggatgacatggatgacagtgtgttctcacccaacccgctgcgcgccgcgtctctgcgattgaaggagggttctgacagggaaggaccgaggagtctggcctcctccctggctctgggagcggtgggcgcggcggcgcggggcagtagccccttccccagcctggcagactctctgaacagcgggcgggtgagcaggccccgcttgctaggcgaggaggagtatctgaacaactccctgctgcagcccgcgagggacaaaaacgctcagcggcagcagtttcccaacaatgggatagagagcctggtggacaagatgtccagatggaagacgtatgcgcaggagtacaaggagtgggaggaccgccagccgcggcccctgccgccccctaggcagcgctggcagcggcgcgcgtccaaccgccgctggaggcaggggcccgaggacgatgatgactctgcagatgacagcagcgtgctggacctgggcgggagcgggaaccccttttcgcacctgcgcccccgcctgggcaagatgttttaaaagagaaaaaataaaaactcaccaaggccatggcgacgagcgttggttttttgttcccttccttagtatgcgacgcgcggcgatgttcgaggaggggcctcccccctcttacgagagcgcgatgggattttctcctgcgacgcccctacagcctccctacgtgcctcctcggtacctgcaacctaccgggggaagaaatagcatctgttactctgagctgcagcccctgtatgacaccaccaaagtgtacctggtggacaacaagtctgcggacgtggcctccctgaactaccagaacgaccacagcgattttttgaccaccgtgatccaaaacaatgacttcaccccaaacgaggccagcacccagaccataaacctggacaacaggtcgcactggggcggtgatctgaagaccatcttgcacaccaacatgcccaacgtgaatgagtttatgtttactaactcttttaaggcgcgggtaatggtggcgcgcgacgataagggagtgcctaaatacgagtgggtggactttacactgcccgagggcaactactccgagatcatgactcttgacctgatgaacaacgcgatcgtggagcactacttgaaagtaggcaggcagaacggggtaaaagaaagcgatattggagttaagtttgacaccaggaactttcgcctgggatgggaccccgagacggggttggttatgcccggggtttacactaatgaagcttttcaccccgatatagtgctcttgcccggatgcggggtggacttcacccaaagccggctgagcaacctgctgggcattcgaaagcgccagccattccaggaggggtttcaaatcacttatgagcatttggaagggggcaacattccggcgcttctggatttggtcgcctacgaggagagtttgaaatccgaggaaagcggggataacactgacaagggcggcgaggagcaagccggcgatggcgacactgcttcggtagaaaacgaaagtgcgtccgtggtggaggcggcggcggtagcgaccgcagagccggagaccgtagaggaggatatgaatgatagcgcaatcagaggagactcgtttattccccggggcgaagaaaagaaggcggaggctgcggcagcagtcgaagcagagcccaaagtcgagtcggagatcatggaggaggatttgaatgataacgcgatcagaggtgatacgtttgtgccgcggggcgaagaaaaaaaagcggaggcggaggccgcggctgaggaggcggccgaggctgtggcagccaccgcggcggtgactgaaacaactgaggagcaggttcaggccgagcaggttcaaaagaagcccgtgattaaagccctaacacaagatagcaaggagcgcagttacaacttgattcccggtagtactgacaccgagtaccgcagctggtacctggcatacaactacggcgacccggtcaaaggggtgcgctcgtggactctgctttgcacgccggacgtcacctgcggctccgagcagatgtactggtcgttgccaaacatgatgcaagacccggtgaccttccgctccacgcggcaggttaacaacttcccggtggtgggcgccgaactgctgcccgtgcactccaagagcttttacaacgagcaggccgtgtactcccagctgatccgccaggccacctctctgacccacgtgttcaatcgctttcccgagaaccagattttggcgcgcccgccggcccccaccatcactaccgtcagtgaaaacgttcctgctctcacagatcacgggacgctaccgctgcgcaacagcatctcaggagtccagcgagtgaccattactgacgccagacgccggacctgcccctacgtttacaaggccttgggcatagtctcgccgcgcgtcctctccagccgcactttttaaaacacatattcacccacgcttcaaagattatgtctatacttatctcacccagcaataacaccggctgggggctgcgcgcgcccagcaagatgtttggaggggcgagaaaacgttccgagcagcacccagtgcgcgtgcgcggccactaccgcgcgccctggggagcgcacaagcgcgggcgcgcagggcgcaccactgtggacgacgccattgactccgtagtggagcaggcgcgccactacacacccggcgcgccgtccgcccccgccgtgtccaccgtggacgaggcgatcgaaagcgtggtacagggcgcgcggcactatgccaaccttaaaaatcgccgccgtcgcgtggcccgccgccatcgccggagaccccgggccaccgccgccgcgcgccttgctaaggctctactcaggcgcgccaggcgaactggccgccgggccgccatgagggccgcacggcgggctgccgccagtgcggccgccgcggccccacgggcacgaaggcgcgcggccgctgccgccgccgccgccatttccagcttggcctcaacgcggcgcggtaacatatactgggtgcgcgactcgataaccggcacgcgggtacccgtgcgctttcgccccccgcggaattagcacaagacaacatacacactgagtctcctgctgttgtgtatcccagcggcgaccgtcagcagcggcgacatgtccaagcgcaaaattaaagaagagatgctccaggtcatcgcgccggagatctatgggcccccgaagaaggaggaggatgattacaagccccgcaagctaaagcgggtcaaaaagaaaaagaaagatgatgatgatgacgaggcggtggagtttgtccgccgcatggcacccaggcgccccgtgcagtggaagggtcggcgcgtgcagcgcgttttgcgccccggcaccgcggtggtcttcacgcccggcgagcgctccacgcgcactttcaagcgggtgtacgatgaggtgtacggcgacgaggacctgttggagcaggccaaccagcgctttggggagtttgcatatgggaaacggccccgcgagagtctaaaagaggacctgctggcgctaccgctggacgagggcaatcccaccccgagtctgaagccggtgaccctgcaacaggtgctgcctttgagcgcgcccagcgagcataagcgagggttgaagcgcgagggcggggacctggcgcccaccgtgcagttgatggtgcccaagcggcagaagctggaggacgtgctggagaaaatgaaagtagagcccgggatccagcccgagatcaaggtccgccccatcaagcaggtggcgcccggcgtgggagtccagaccgtggacgttaggattcccacggaggagatggaaacccaaaccgccactccctcttcagcggccagcgccaccaccggcaccgcttcggtagaggtgcagacggacccctggctacccgccgccgctgtcgccgccgccgccgccccccgttctcgcgggcgcaagagaaattatccagtggccagcgcgctcatgccccagtacgcactgcatccatccatcgcgcccacccccggctaccgcgggtattcgtaccgcccgcgcagatcggccggcactcgcggccgccgccgccgtgcgaccacaaccagccgccgccgtcgccgccgccgccagccagtgctgacccccgtgtctgtaaggaaggtggctcgctcggggagcacgctggtggtgcccagagcgcgctaccaccccagcatcgtttaaagccggtctctgtatggttcttgcagatatggccctcacttgtcgcctccgcttcccggtgccgggataccgaggaagaactcaccgccgcagaggcatggcgggcagcggtctccgcggcggccgtcgccatcgccggcgcgcaaaaagcaggcgcatgcgcggcggtgtgctgcctctgctaatcccgctaatcgccgcggcgatcggtgccgtacccgggatcgcctccgtggccctgcaggcgtcccagaaacgttgactcttgcaaccttgcaagcttgcatttttttggaggaaaaataaaaaagtctagactctcacgctcgcttggtcctgtgactattttgtagaaaaaagatggaagacatcaactttgcgtcgctggccccgcgtcatggctcgcgcccgttcatgggagactggacagatatcggcaccagcagtatgagcggtggcgccttcagctggggcagtctgtggagcggccttaaaaattttggttccaccattaaaaactatggcaacaaagcgtggaacagcagcacgggccagatgctaagagacaagttgaaagagcagaacttccaggagaaggtggcgcagggcctggcctctggcatcagcggggtggtggacatagctaaccaggccgtgcagaaaaagataaacagtcatctggacccccgccctcaggtggaggaaacgcctccagccatggagacggtgtttcccgagggcaaaggcgaaaagcgcccgcggcccgacagggaagagaccctggtgtcacacaccgaggagccgccctcttacgaggaggcactcaaggccggcctgcccaccactcgccccgtagctcccatggccacaggtgtggtgggccataaacaacacacccccgcaacactagatctgcccccgccgtccgagccgccgcgtcagccaaagacggcgacggtgcccgctccctccacttccgccgccaacagagtgtccctgcgccgcactacgggcgcccctcggggaccgcgactgagcggcaactggcagagcacactgaacagcattgtgggcctgggagtgaaaagtgtgaagcgccgccgttgctactgaatgagcaagctagctaacgtgttatatgtgtgtatgcgtcctatgtcgccgccagaggagctgttgagccgcccgcgccgtctgcactccagcgaatttcaagatggcgaccccttcgatgatgccacagtggtcgtacatgcacatctcgggccaggacgcctcggagtacctgagccccgggctggtgcagttcgcccgcgccaccgacagctacttcagcctaagtaacaaatttaggaaccctacggtggcacccacccacgatgtgaccacggaccggtcgcagcgcctgacgctgcggtttatccccgtggatcgggaggacactgcctactcttacaaggcgcgcttcacgctagccgtgggcgacaaccgcgtgctggacatggcctccacctactttgatatccggggtgtgctggacaggggtcccacctttaagccctactcgggcactgcctacaactccctggctcctaaaggcgctcccaattcttgcgagtgggatgaaaaaactaatactgctgaagcagccattgaaaatgaagaagagctggcggatgagccagaagagcaagcagaagaggctataaaaaccaatgtgtttgcccaggcgccatattctggcaatgcaatttccaaagaaggaatacaagtaggcatagaaggcattggagagcaagtaaaagccgtatacgcagacaaaacctaccagccggaacctcaggttggagaaactcaatggaatgagactgaaataaatcatggagcaggaagggtgctgaagaagaccactcccatgaagccttgctatggttcttatgctaaacctactaatgaatatggaggccagggcatccttgtagaaaaaaatggcaaaatggaaagccaggtggaaacacagttttttgctcttgacggtgaaaatgataatagtccaaaagtggtgttgtatagcgaagatgtaaacttggatactcctgacacacacctatcatacaaacctagcgcccaagatgtaaactctaaagaaatgttgggccaacaggccatgcccaacaggccaaatcttattgcttttagggacaactttattggacttatgtactacaacagcactggcaacatgggagtgctggcaggacaggcctcccaactaaatgccgtggtagacttgcaagacagaaacacagagttgtcataccagctgatgcttgattccattggagacagatcaagatattttgccatgtggaaccaggcggttgatagttacgatccagatgttagaattattgaaaaccatggcacagaggatgaacttccaaactactgttttcctttgggaggaatatttaatactcagagttttaaaaaggtaaaacctggaacggataacggatgggaaacagatgatgacttttcagataaaaatgaaataagagttggcaacaactttgccatggagatcaatatccaggcaaacctgtggagaagcttcttgtattccaatgtggctctctacctgccagataagatgaagtactctccaaccaacatagacatttccaccaacactaacacctatgactacatgaacaaaagagtggcgcctccaggcctggtggactgctatgtcaatctgggggccaggtggtcccttgatgtaatggataacatgaacccctttaaccaccaccgcaatgcgggcctgcgataccgttccatgcttctgggtaacggccgctacgtgcccttccacatccaggtgccccaaaagttctttgccatcaaaagccttctactcttgcctggctcgtacacctacgaatggaatttcagaaaggatgtgaacatggtcctacagagctctctgggcaacgaccttagggtggatggggccagcatcaagtttgacagcatcaccctttatgctacctttttccccatggcccacaacaccgcttccacgcttgaggccatgctcagaaacgacaccaacgaccagtccttcaatgactacctctctggggccaacatgctctaccccatccccgccaacgctaccaacgtgcccatctccattccctctcgcaactgggccgccttcagaggctgggcatttacccgccttaagaccaaggagaccccctccctgggctcgggttttgacccctactttgtctactcgggatccatcccctacctggatggcaccttctacctcaaccacacttttaagaagatatccatcatgtatgactcctctgtcagctggccgggcaacgaccgcctgctcacccccaatgagttcgaggtcaagcgcgccgtggacggcgagggctacaacgtggcccagtgcaacatgaccaaggactggttcctggtgcagatgctggccaactacaacataggctaccagggcttctacatcccagagagctacaaggacaggatgtactccttcttcagaaatttccaacccatgagcaggcaggtggtggacgagaccaaatacaaggactatcaggccgttggcatcactcaccagcacaacaactcgggattcgtgggctacctggcacccaccatgcgcgagggacaggcctaccccgccaacttcccctaccccttgataggcaagaccgcggtcgacagcgtcacccagaaaaagttcctctgcgaccgcaccctctggcgcatccccttttctagcaacttcatgtccatgggcgcgctcacggacctgggccagaacctgctctatgccaactccgcccatgcgctggacatgacttttgaggtggaccccatggacgagcccacccttctctatattgtgtttgaagtgttcgacgtggtcagagtgcaccagccgcaccgcggtgtcatcgagaccgtgtacctgcgcacgcccttctcggccggcaacgccaccacctaaggagacagcgccgccgcctgcatgacgggttccaccgagcaagagctcagggccatcgccagagacctgggatgcggaccctattttttgggcacctatgacaaacgcttcccgggcttcatctcccgagacaagctcgcctgcgccatcgtcaacacggccgcgcgcgagaccgggggcgtgcactggctggcctttggctgggacccgcgctccaaaacttgctacctctttgacccttttggcttctccgatcagcgcctcaagcagatctatgagtttgagtacgaggggctgctgcgccgcagcgcgcttgcctcctcgcccgaccgctgcatcacccttgagaagtccaccgagaccgtgcaggggccccactcggccgcctgcggtctcttctgctgcatgtttttgcacgcctttgtgcgctggccccagagtcccatggatcgcaaccccaccatgaacttgctcaagggagtgcccaacgccatgctccagagcccccaggtccagcccaccctgcgccacaaccaggaacagctctaccgcttcctggagcgccactccccctacttccgcagtcacagcgcgcgcatccggggggccacctctttctgccacttgcaagaaaacatgcaagacggaaaatgatgtacagctcgctttttaataaatgtaaagactgtgcactttatttatacacgggctctttctggttatttattcaacaccgccgtcgccatctagaaatcgaaagggttctgccgcgcgtcgccgtgcgccacgggcagagacacgttgcgatactggaagcggctcgcccacttgaactcgggcaccaccatgcggggcagtggttcctcggggaagttctcgccccacagggtgcgggtcagctgcagcgcgctcaggaggtcgggagccgagatcttgaagtcgcagttggggccggaaccctgcgcgcgcgagttgcggtacacggggttgcagcactggaacaccagcagggccggattatgcacgctggccagcaggctctcgtcgctgatcatgtcgctgtccagatcctccgcgttgctcagggcgaatggggtcatcttgcagacctgcctgcccaggaaaggcggcagcccgggcttgccgttgcagtcgcagcgcaggggcatcagcaggtgcccgcggcccgactgcgcctgcgggtacagcgcgcgcatgaaggcttcgatctgcctgaaagccacctgcgccttggctccctccgaaaagaacatcccacaggacttgctggagaactggttcgcgggacagctggcatcgtgcaggcagcagcgcgcgtcggtgttggcgatctgcaccacgttgcgaccccaccggttcttcactatcttggccttggaagcctgctccttcagcgcgcgctggccgttctcgctggtcacatccatctctatcacctgctccttgttgatcatgtttgtcccgtgcagacacttcaggtcgccctccgtctgggtgcagcggtgctcccacagcgcgcaaccggtgggctcccaattcttgtgggtcacccccgcgtaggcctgcaggtaggcctgcaagaagcgccccatcatggccacgaaggtcttctggctcgtaaaggtcagctgcaggccgcgatgctcttcgttcagccaggtcttgcagatggcggccagcgcctcggtctgctcgggcagcatcctaaaatttgtcttcaggtcgttatccacgtggtacttgtccatcatggcgcgcgccgcctccatgcccttctcccaggcggacaccatgggcaggcttagggggtttatcacttccaccggcgaggacaccgtactttcgatttcttcttcctccccctcttcccggcgcgcgcccacgctgctgcgcgctctcaccgcctgcaccaaggggtcgtcttcaggcaagcgccgcaccgagcgcttgccgcccttgacctgcttaatcagcaccggcgggttgctgaagcccaccatggtcagcgccgcctgctcttcttcgtcttcgctgtctaccactatctctggggaagggcttctccgctctgcggcggtgcgcttcttttttttcttgggagcagccgtgacggagtccgccacggcgacggaggtcgagggcgtggggctgggggtgcgcggtaccagggcctcgtcgccctcggactcttcctctgactccaggcggcggcggagtcgcttctttgggggcgcgcgcgtcagcggcggcggagacggggacggggacggggacgggacgccctccacagggggtggtcttcgcgcagacccgcggccgcgctcgggggtcctctcgagctggtcttggtctcgactggccattgtatcctcctcctcctaggcagagagacataaggagtctatcatgcaagtcgagaaggaggagagcttaaccaccccctctgacaccgccgatgcgcccgccgtcgccgtcgcccccgctgccgccgacgcgcccgccacaccgagcgacacccccgcggacccccccgccgacgcacccctgttcgaggaagcggccgtggagcaggacccgggctttgtctcggcagaggaggatttgcgagaggaggagaataaggagaagaagccctcagtgccaaaagatgataaagagcaagacgagcacgacgcagatgcacaccagggtgaagtcgggcggggggacggagggcatggcggcgccgactacctagacgaagggaacgacgtgctcttgaagcacctgcatcgtcagtgcgccatcgtttgcgacgctctgcaggagcgcagcgaagtgcccctcagcgtggcggaggtcagccacgcctacgagctcagcctcttctccccccgggtgcccccccgccgccgcgaaaacggcacatgcgagcccaacccgcgcctcaacttctaccccgccttcgtggtgcccgaggtcctggccacctatcacatcttctttcaaaattgcaagatccccctctcgtgccgcgccaaccgtagccgcgccgataagatgctggccctgcgccagggcgaccacatacctgatatcgccgctttggaagatgtgccaaagatctttgagggtctgggtcgcaacgagaagcgggcagcaaactctctgcaacaggaaaacagcgaaaatgagagtcacaccggggtactggtggagctcgagggcgacaacgcccgcctggcggtggtcaagcgcagcatcgaggtcacccactttgcctaccccgcgctaaacctgccccccaaagtcatgaacgcggccatggacgggctgatcatgcgccgcggccggcccctcgctccagatgcaaacttgcatgaggagaccgaggacggccagcccgtggtcagcgacgagcagctggcgcgctggctggagaccgcggaccccgccgaactggaggagcggcgcaagatgatgatggccgcggtgctggtcaccgtagagctggagtgtctgcagcgcttcttcggcgaccccgagatgcagagaaaggtcgaggagaccctgcactacaccttccgccagggctacgtgcgccaggcttgcaagatctccaacgtggagctcagcaacctggtgtcctacctgggcatcttgcatgagaaccgcctcgggcagagcgtgctgcactccaccctgcgcggggaggcgcgccgcgactacgtgcgcgactgcgtttacctcttcctctgctacacctggcagacggccatgggggtctggcagcagtgtctggaggagcgcaacctcaaagagctggagaagctcctgcagcgcgcgctcaaagacctctggacgggctacaacgagcgctcggtggccgccgcgctggccgacctcatcttccccgagcgcctgctcaaaaccctccagcaggggctgcccgacttcaccagccaaagcatgttgcaaaacttcaggaactttatcctggagcgttctggcatcctacccgccacctgctgcgccctgcccagcgactttgtccccctcgtgtaccgcgagtgccccccgccgctgtggggtcactgctacctgttccaactggccaactacctgtcctaccacgcggacctcatggaggactccagcggcgaggggctcatggagtgccactgccgctgcaacctctgcacgccccaccgctccctggtctgcaacacccaactgctcagcgagagtcagattatcggtaccttcgagctacagggtccgtcctcctcagacgagaagtccgcggctccggggctaaaactcactccggggctgtggacttccgcctacctgcgcaaatttgtacctgaagactaccacgcccacgagatcaggttttacgaggaccaatcccgcccgcccaaggcggagctgaccgcctgcgtcatcacccagggcgagatcctaggccaattgcaagccatccaaaaagcccgccaagattttttgctgaagaagggtcggggggtgtatctggacccccagtcgggtgaggagctcaacccggttcccccgctgccgccgccgcgggaccttgcttcccaggataagcatcgccatggctcccagaaagaagcagcagcggccgccactgccgccaccccacatgctggaggaagaggaggaatactgggacagtcaggcagaggaggtttcggacgaggaggagccggagacggagatggaagagtgggaggaggacagcttagacgaggaggcttccgaagccgaagaggcagacgcaacaccgtcaccctcggccgcagccccctcgcaggcgcccccgaagtccgctcccagcatcagcagcaacagcagcgctataacctccgctcctccaccgccgcgacccacggccgaccgcagacccaaccgtagatgggacaccaccggaaccggggccggtaagtcctccgggagaggcaagcaagcgcagcgccaaggctaccgctcgtggcgcgctcacaagaacgccatagtcgcttgcttgcaagactgcggggggaacatctccttcgcccgccgcttcctgctcttccaccacggtgtggccttcccccgtaacgtcctgcattactaccgtcatctctacagcccctactgcggcggcagtgagccagagacggtcggcggcggcggcgcccgtttcggcgcctaggaagacccagggcaagacttcagccaagaaactcgcggcggccgcggcgaacgcggtcgcgggggccctgcgcctgacggtgaacgaacccctgtcgacccgcgaactgaggaaccgaatcttccccactctctatgccatcttccagcagagcagagggcaggatcaggaactgaaagtaaaaaacaggtctctgcgctccctcacccgcagctgtctgtatcacaagagcgaagaccagcttcggcgcacgctggaggacgctgaggcactcttcagcaaatactgcgcgctcactcttaaggactagctccgcgcccttctcgaatttaggcgggaacgcctacgtcatcgcagcgccgccgtcatgagcaaggacattcccacgccatacatgtggagctatcagccgcagatgggactcgcggcgggcgcctcccaagactactccacccgcatgaactggctcagtgccggcccacacatgatctcacaggttaatgatatccgcacccatcgaaaccaaatattggtggagcaggcggcgattaccaccacgccccgcaataatcccaaccccagggagtggcccgcgtccctggtgtatcaggaaattcccggccccaccaccgtactacttccgcgtgattcccaggccgaagtccaaatgactaactcaggggcgcagctcgcgggcggctgtcgtcacagggtgcggccccctcgccagggtataactcacctggagatccgaggcagaggtattcagctcaacgacgagtcggtgagctcctcgctcggtctcagacctgacgggaccttccagatagccggagccggccgatcttccttcacgccccgccaggcgtacctgactctgcagagctcgtcctcggcgccgcgctcgggcggcatcgggactctccagttcgtgcaggagtttgtgccctcggtctacttcaaccccttctccggctctcccggtcgctacccggaccagttcatctcgaactttgacgccgcgagggactcggtggacggctacgactgaatgtcgggtggacccggtgcagagcaacttcgcctgaagcacctcgaccactgccgccgccctcagtgctttgcccgctgtcagaccggtgagttccagtacttttccctgcccgactcgcacccggacggcccggcgcacggggtgcgctttttcatcccgagtcaggtgcgctctaccctaatcagggagtttaccgcccgtcccctactggcggagttggaaaaggggccttctatcctaaccattgcctgcatctgctctaaccctggattgcaccaagatctttgctgtcatttgtgtgctgagtataataaaggctgagatcagaatctactcgggctcctgtcgccatcctgtcaacgccaccgtccaagcccggcccgatcagcccgaggtgaacctcacctgcggtctgcaccggcgcctgagaaaatacctagcttggtactacaacagcactccctttgtggtttacaacagctttgaccaggacggggtctcactgagggataacctctcgaacctgagctactccatcaggaagaacagcaccctcgagctacttcctccttacctgcccgggacttaccagtgtgtcaccggtccctgcacccacacccacctgttgatcgtaaacgactctcttccgagaacagacctcaataactcctcttcgcagttccccagaacaggaggtgagctcaggaaaccccgggtaaagaagggtggacaagagttaacacttgtggggtttctggtgtatgtgacgctggtggtggctcttttgattaaggcttttccttccatgtctgaactctccctcttcttttatgaacaactcgactagtgctaacgggaccctacccaacgaatcgggattgaatatcggtaaccaggttgcagtttcacttttgattaccttcatagtcctcttcctgctagtgctgtcgcttctgtgcctgcggatcgggggctgctgcatccacgtttatatctggtgctggctgtttagaaggttcggagaccatcgcaggtagaataaacatgctgctgcttaccctctttgtcctggcgctggccgccagctgccaagccttttccgaggctgattttatagaaccccagtgcaatatcacttataaatctgaatataacctctgcactatcctaattaaatgcgttactcaacacgatgaggtaactgttagatacaaagatcaatcaaaaagagacgcactttacagcagctggcaaccaggagatgaacaaaaatacaatgtgaccgtcttccagggcaaactctccaaaacttacaattacactttcccattcgaggagatgtgtgagtttgtcatgttcatgtcaaagcagtacaagatgtggcctccgactccccagggctgtgtggaaaatccaggctctttctgcatgatctctctctgtgtaactgtgctggcactaatactcacgcttttgtatatcagatttaaatcaaggcaaagcttcatcgatgaaaagaaaatgccttaatcgcttttcacgcttgattgctaacaccgggtttttatccgcagaatgattggaatcaccctactaatcacctccctccttgcgattgcccatgggttggaacgaatcgaagtccctgtgggggccaatgttaccctggtggggcctgtcggcaatgctacattaatgtgggaaaaatatactaaaaatcaatgggtctcttactgcactaacaaaaacagccacaagcccagagccatctgcgatgggcaaaatttaaccttgattgatgttcaattgctggatgcgggctactattatgggcagctgggtacaatcgttaattactggagaccccacaaagattacatgcttcacgtagtaaagggtccccttagcagcccgaccactaccaccacctctaccacacccactaccaccactactcccatcaccagcactgccacccagcctcctcatagcagaacaaccacttttatcaattccaagtcccactccccccacattgccggcgggccctccgcctcaaactccgagaccaccgagatctgcttctgcaaatgctctgacgccattgcccaggatttggaagaccacgaggaagatgagcatgacttcgcagatgcatgccaggcatcaggggcagaagcactgccggtggccctcaaacagtatgcagactcccataccacccccgatcttccaccgccttcccagaagccaagtttcctgggggaaaatgaaacactgcctctctccatacttgctttgacatctgttgctattctgactgctctgctggtgctcctatgctctatatgctacctgatctgctgcaggaagaaaaaatctcacggccatgctcaccagccgcttatgcacttcccttaccctccagagttgggcgaccacaaactttaagtctgcagtagctatctgcccatcccttgtcagtcgacagcgatgagccccactaatctaacggcctctggacttacaacattgtctcttaatgagaccaccgctcctcaagacctgtacgatggtgtctccgcgctggttaaccagtgggatcacctgggcatatggtggctcctcataggagcagtgaccctgtgcctaatcctggtctggataatctgctgcatcaaaagcagaagacccaggcggcggcccatctacaggcccttcgtcatcacacctgaagatgatgatggcaccacgtccaggctgcagagcctaaagcagctactcttctcttttacagcatggtaaattgaacatgcctcgcattttcatctacttgtttcttcttccactctttttgggctcttctacattggcagctgtgtcccacatcgaggtagactgcatctcgcccttctcagtctacttactcttcggctttgtcatttgcaactttgtctgcagcgttatcactgtagtgatctgcttcatacagtgcatcgactacgtctgcgtacgggtggcctattttagacaccacccccagtatcgcaacagggacatagcggctctcctaagacttgtttaaatcatgcccaaattaactgtgattgctcttctgattatctgctgcgtcctagccgcgattgggactcagcctactaccaccaccaccagcgctcccagaaagagacatgtttcctgcagcttcaaacgtccctggaatataccccaatgctttactgatgaacctgaaatctctttggcttggtacttcagcgtcaccgcccttctcatcttctgcagtacggttattgcccttgccatttacccttcccttgacctgggctggaatgctgtcaactctatggaatatcccaccttcccagaaccagacctgccagacctggttgttctaaacgcgtttcctcctcctcccgttcaaaatcagtttcgccctccgtccccgacgcccactgaggtcagctactttaatctaacaggcggagatgactgaaaacctagacctagaaatggacggcctctgcagcgaacaacgcatactagagaggcgccggcaaaaagcagagctcgagcgtcttaaacaagagctccaagacgcggtggccatacaccagtgcaaaaaaggtgtcttctgtctagtgaaacaggccacgctcacctatgaaaaaacaggtgacacccaccgcctaggatacaagctgcccacacaacgccagaagttcgcccttatgataggcgaacaacccatcaccgtcacccagcactctgtggagacagaaggctgcatacacgctccctgcaggggcgctgactgtctctacaccttgatcaaaaccctctgcggccttagagacctcatccctttcaattgatcataactgtaatcaataaaaaatcacttacttgaaatctgatagcaagcctctgtccaattttttcagcaacacttccttcccctcctcccaactctggtactctaggcgcctcctagctgcaaacttcctccacagtctgaagggaatgtcagattcctcctcctgtccctccgcacccacgatcttcatgttgttgcagatgaaacgcgcgagatcgtctgacgagaccttcaaccccgtgtacccctacgataccgagatcgctccgacttctgtcccttttcccacccctccctttgtgtcccccgcaggaatgcaagaaaacccccctggagtgctatccctacgccttgcagaacccttgaccacctccaatggagcgctgaccctaaaaatggggggtggtttgaccctggacgaagaaggaaagcttacttcccaaaatattaccagtgttgatcctcctcttaaaaaaacaaaaaacaatatcagtctgcagactgcctccccccttgccgtcagctcgggagccctcacacttttcgctactcctcccctggcagttaatgacaataacctaactgtgcagtctcaggctccccttacactggaaaactcaaaactaagtctggccaccaaaggccccctaaccgtttctgaaggaaaacttgccctagaaacagaggctcccttgcatgcaagcgacagcagtagcctaggccttagtgtaacggccccactgagcattagcagcgacagcctaggactagacttgcaagcgcccattatttctgaaaatggaaaactgggcctaagagtaacaggtcccctaactgtggccagcagtattgatgctttgacagtagccacaggcagcggtattggacttgatagcaacacgcgcctacaggcaaaattggtcgcgcccctaggctttgacaccaatggcaacattaagctcagcacttcgggcggcatgagactgaacaatggcacacttatactagatgtaaactacccatttgaggctcaaggtcaacttagtctaagagtgggttcgggtccactgtatgtagactccaacacacataacctaaccgctagatgccttagagggctatacataacgtcatctaataaccaaaccggcctggaggccaacataaaacttacaaaaggacttgtgtttgatggaaatgccatagcagttaatgttagcaaagggctagaatacagtaccactgaaacagcgcagggtgtaaatcccatacagactaaaataggtttgggcatggaatatgataccaatggagccataaagccaagactaggctctggtttgagctttgataattcaggagctattgtagtgggaaacaaaaatgatgacactcttactctgtggactacaccagacccatctcccaactgtcagattaactcggaaaaagatgctaaactaaccttggtactaaccaagtgcggtagtcaaattgtaggcacagtatctgcctttgctcttaaaggcagccttgccccaattaatggcacagtgagctcagttagtatattcctaagatttaatgaaaatggggtactgatgagcaactcatcgttggaaagccaatactggaattacaggaatggaaattcaactaatgccacaccatatacaaatgcactaggttttatgcctaacctggcagcttatcccaaaggccaggcaacgactgcaaaaagcagcatcattagccaggtttacatgaatggtgacacttccaaacctatgatatttacaataacttttaatgggcttgaaacagaggaaactcaggtcagtacatattccatgacattttcatggaggtggacaaatggagactacgtggggcactattttaaaacaaactcctttactttctcctacattgcccaagaataaagaaagcacagagatgcttgtttttgatttcaaaattgtgtgcttttatttatttcaagcttacagtatttccagtagtcattcgaatagagcttaattaaactgcatgagaacccttccacatagcttaaattagcaccagtgcaaatggagaaaaatcaacatacctttttatccagatatcagagaactctagtggtcagttttcccccaccctcccagctcacagaatacacagtcctttccccccggctggctttaaacaacactatctcattggtaacagacatattcttaggtgtaataatccacacggtctcttggcgggccaaacgctggtcggtgatgttaataaactccccaggcagctctttcaagttcacgtcgctgtccaactgctgaagcgctcgcggctccgactgcgcctctagcggaggcaacggcaacacccgatccttgatctataaaggagtagagtcataatcccccataagaatagggcggtgatgcagcaacaaggcgcgcagcaactcctgccgccgcctctccgtacggcaggaatgcaacggcgtggtggtctcctccgcgataatccgcaccgctcgcagcatcagcatcctcgtcctccgggcacagcagcgcatcctgatctcactgagatcggcgcagtaagtgcagcacaaaaccaagatgttatttaagatcccacagtgcaaagcgctgtacccaaagctcatggcgggaaggacagcccccacgtgaccatcataccagatcctcaggtaaatcaaatgacgacctctcataaacacgctggacatgtacatcacctccttgggcatgtgctgattcaccacctctcgataccacaagcatcgctgattaattaaagacccctcgagcaccatcctgaaccaggaagccagcacctgaccccccgccaggcactgcagggaccccggtgaatcgcagtggcagtgaagactccagcgctcgtagccgtgaaccatagagctggtcattatatccaaattggcacaacacagacacactttcatacactttttcatgattagcagctcctctctagtcaggaccatatcccaaggaatcacccactcttgaatcaaggtaaatcccacacagcagggcaggcctctcacataactcacgttatgcatagtgagcgtgtcgcaatctggaaataccggatgatcttccatcaccgaagcccgggtctccgtctcaaagggaggtaaacggtccctcgtgtagggacagtggcgggataatcgagatcgtgttgaacgtagagtcatgccaaagggaacagcggacgtactcatatttcctccagcagaaccaagtgcgcgcgtggcagctatccctgcgtcttctgtctcgccgcctgccccgttcggtgtagtagttgtaatacagccactccctgagaccgtcaaggcgctccctggcgtccggatctatgacaacaccgtcctgcagcgccgccctgatgacatccaccaccgtagagtatgccaagcccagccaggaaatgcattcactttgacagcgagagataggaggagcggggagagatggaagaaccatgatagtaaagagaacttttattccaatcgatcttctaagatatcaaagtggagatctataagatgacactggtctcctccgctgagtcgatcaaaaataacagctaaaccacaaacaacacgattggtcaaatgctccacaagggcctgcagcataaaattgcctcggaactccaccgcaagcataacatcaaagccaccgcctctatcgtgatcaagaataaaaaccccacagctatccaccagacccatatagttttcatctctccatcgtgaaaaaagatttacaagctcctcctttaaatcacctccaaccaattgaaaaagttgaaccagaccgccctccaccttcattttcagcaagcgtatcatgattgcaaaaattcaggctcctcagacacctgtataagattgagaagcggaacgttaacatcgatgtttcgctcgcgtaaatcacgcctcagtgcaagcataatataatcccacaggtcggagcggatcagcgaggacacctccccgccaggaaccaactcaacggagcctatgctgattataatacgcatattcggagctatgctaaccagcacggcccccaaataggcgtactgcataggcggcgacaaaaagtgaacagtttgggttaaaaaatcaggcaaacactcgcgcaaaaaagcaagaacatcataaccatgctcatgcaaatagatgcaagtaagctcaggaacgaccacagaaaaatgcacaatttttctctcaaacatgactgcgagccctgcaaaaaataaaaaagaaacattacacaagagtagcctgtcttacgatgggatagactactctaaccaacataagacgggccacaacatcgcccgcgtggccataaaaaaaattgtccgtgtgattaaaaagaagcacagatagctggccagtcatatccggagtcatcacgtgtgaacccgtgtagacccccgggttggacacatcggccaaagaaagaaagcggccaatgtacccaggaggaattataacactaagacgaagatacaacagaataaccccatgagggggaataacaaagttagtaggtgaataaaaacgataaacacccgaaactccctcctgcgtaggcaaaatagcaccctccccttccaaaacaacatatagcgcttccacagcagccatgacaaaagactcaaaacactcaaaagactcagtcttaccaggaaaataaaagcactctcacagcaccagcactaatcagagtgtgaaaagggccaagtgccgaacgagtatatataggaataaaaaatgacgtaaatgtgtaaaggtcagaaaacgcccagaaaaatacacagaccaacgcccgaaacgaaaacccgcgaaaaaatacccagaacttcctcaacaaccgccacttccgctttctcacgatacgtcacttccgcaagaaaagcaaaactacatttcccacatgtgtaaaaacgaaaccccgccccttctaaccgcccacaacttacatcatcaaaacgtaaagtcctacgtcacccgccccgcctctccccgcccacctcattatcatattggccacaatccaaaataaggtatattattgatgatg

SEQ ID NO: 48 - DNA, 37074 bp, Gorilla beringei graueri
catcatcaataatataccttattttggattgtggccaatatgataatgaggtgggcggggagaggcggggcgggtgacgtaggacgcgcgagtagggttgggaggtgtggcggaagtgtggcatttgcaagtgggaggagctcacatgcaagcttccgtcgcggaaaatgtgacgtttttgatgagcgccgcctacctccggaagtgccaattttcgcgcgcttttcaccggatatcgtagtaattttgggcgggaccatgtaagatttggccattttcgcgcgaaaagtgaaacggggaagtgaaaactgaataatagggcgttagtcatagcgcgtaatatttaccgagggccgagggactttgaccgattacgtggaggactcgcccaggtgttttttacgtgaatttccgcgttccgggtcaaagtctccgtttttattgtcaccgtcatttgacgcggagggtatttaaacccgctgcgctcctcaagaggccactcttgagtgccagcgagaagagttttctcctctgctccgcttcggtgatcgaaaaatgagacacatagcctgcactccgggtcttttgtccggtcgggcggcggccgagcttttggacgctttgatcaatgatgtcctgagcgatgattttccgtctactacccactttagcccacctactcttcacgaactgtacgatctggatgtactggtggatgtgaacgatcccaacgaggaggcggtttctgcgttttttcccgagtctgcgctgttggccgctcaggagggatttgacctacacactccgccgcctattttagagtctccgctgccggagcccagtggtataccttatatgcctgaactgcttcccgaagtggtagacctgacctgccacgagcctggctttccgcccagcgacgatgatggtgagccttttgttttagactttgctgagatacctgggcacggttgcaggtcttgtgcatatcatcagagggttaccggagaccccgaggttaagtgttcgctgtgctatatgaggatgacctcttcctttatctacagtaagtttttgtctaggtgggcttttgggtaggtgggttttgtgtcagaacaggtgtaaacgttgcttgtgttttttgtacctgtaggtccggtgtccgagccagacccggagcccgaccgcgatcccgagccggatcccgagcctcctcgcaggacaaggaaactaccttccattctgtgcaagtctcagacacctgtaaggaccagcgaggcagacagcaccgactctggcacttctacctctccccctgaaattcacccagtggttcctctgggtatacataaacctgttgctgttagagtttgcgggcgacgccctgcagtacagtgcattgaggacttgcttcacgatcccgaggaacctttggacttgagccttaaacgccctaggcaataaaccccacctaagtaataaaccccacctaagtaataaaccctgccgcccttggttattgagatgacgcccaatgtttgcttttgaatgacttcatgtgtgtaataaaagtgagtgtgatcataggtctcttgtttgtctgggcggggcttaagggtatataagtttctcggggctaaacttggttacacttgaccccaatggaggcgtgggggtgcttggaggagtttgcggacgtgcgccgtttgctggacgagagctctaaccatacctatactatttggaggtatctgtggggctctactcaggccaagttggtctccagaattaagcaggattacaagtgcgattttgaagagctttttagttcctgcggtgagcttttgcaatccttgaatctgggccatcaggctattttccaggaaaaggttctctcgactttggatttttccactcccgggcgcaccgccgcttgtgtggcttttgtgtcttttgtgcaagataaatggagcgaggagacccacctgagtcacggctacgtactggatttcatggcgatggctctttggagggctcacaacaaatggaagattcagaaggaactgtacggttccgccctacgtcgtccacttttgtcgcgacaggggctgaggtttcccgaccatcggcagcatcagaatctggaagacgagtcggaggagcgagcggaggagaagatcagcttgagagccggcctggaccctcctcaggaggaatgaatctcccgcaggtggttgacctgtttccagaactgagacgggtcctgactatcagggaggatggtcagtttgtgaagaagtttaagagggatcggggtgagggagatgatgaggcggctagcaatttagcttttagtctgatgactcgccaccgaccggaatgtattacctatcagcagattaaggagagttgtgccaacgagctggatcttttgggtcagaagtatagcatagaacagcttaccacttactggcttcagcctggggatgattgggaagaggcgatcagggtgtatgcaaaggtggccctgcggcccgattgcaagtataagattactaagttggttaatattagaaactgctgctatatttctgggaacggggccgaagtggagatagatactcaggacagggtggcttttaggtgttgcatgataaacatgtggcccgggatactggggatggatggggtggtgttcatgaatgtgaggtttacgggccccaactttaatggcacggtgttcatgggcaacaccaacttgctcctgcatggtgcgagtttctatgggtttaataacacctgtatagaggcctggaccgatgtaaaggttcgaggttgttccttttatagctgttggaaggcggtggtgtgtcgccctaaaagcaggggttctgtgaaaaaatgcttgtttgaaaggtgcaccttaggcatcctctctgagggcaactccagggtgcgccataatgtggcttcgaactgcggttgcttcatgcaagtgaagggggtgagcgttatcaagcataactcggtgtgtggaaactgcgaggatcgcgcctcccagatgctgacctgctttgatggtaactgtcacctgttgaagaccattcatataagcagccaccccagaaaggcctggcccgtgtttgagcataacatcctgacccgctgctccttgcatctgggggtcaggaggggtatgttcctgccttaccagtgtaactttagccacactaaaatcctgctggaacccgagtgtatgaccaaggtcagcctaaatggcgtgtttgatgcgactctgagaatctggaaggtgctgaggtatgatgagaccaggaccaggtgccgaccctgcgagtgcggcggcaagcacatgagaaatcagcctgtgatgttggatgtgaccgaggagcttaggcctgaccatctggtgctggcctgtaccagggccgagtttgggtctagcgatgaggataccgattgaggtgggtaaggtgggcgtggctagcagggtggggcgtgtataaattgggggtctaagggtctctctgttttgtcttgcaacagccgccgccatgagcgacaccggcaacagctttgatggaagcatctttagcccctatttgacagtgcgcatgcctcactgggctggagtgcgtcagaatgtgatgggttccaacgtggatggacgccccgttctgccttcaaattcgtctacaatggcctacgcgaccgtgggaggaactccgctggacgccgcgacctccgccgccgcctccgccgccgccgcgaccgcgcgcagcatggctacggacctttacagctctttggtggcgagcagcgcggcctctcgcgcgtctgctcgggatgagaaactgaccgctctgctgcttaaactggaagacttgacccgggagctgggtcaactgacccagcaggtctccagcttgcgtgagagcagccttgcctccccctaatggcccataatataaataaaagccagtctgtttggattaagcaagtgtatgttctttatttaactctccgcgcgcggtaagcccgggaccagcggtctcggtcgtttagggtgcggtggattctttccaacacgtggtacaggtggctctggatgtttagatacatgggcatgagtccatccctggggtggaggtagcaccactgcagagcttcgtgctcgggggtggtgttgtatatgatccagtcgtagcaggagcgctgggcgtggtgctgaaaaatgtccttaagcaagaggcttatagctagggggaggcccttggtgtaagtgtttacaaatctgctcagttgggaggggtgcatccggggggatataatgtgcatcttggactggatttttaggttggctatgttcccacccagatcccttctgggattcatgttgtgcaggaccaccagcacggtatatccagtgcacttgggaaatttatcgtggagcttagacgggaatgcatggaagaacttggagacgcccttgtggcctcccagattttccatacattcgtccatgatgatggcaatgggcccgtgggaagctgcctgagcaaaaatgtttctgggatcgctcacatcgtagttatgttccagggtgaggtcatcataagacatctttacaaatcgggggcggagggtcccggactggggtatgatggtaccctcgggccccggggcgtagttcccctcacagatctgcatctcccaggctttcatttcagagggagggatcatatccacctgcggagcgatgaaaaacacagtttctggcgcaggggagattaactgggatgagagcaggtttctgagcagctgtgactttccacagccggtgggcccatatatcacgcctatcaccggctgcagctggtagttaagagagctgcagctgccgtcctcccggagcaggggggccacctcgttcagcatatccctgacgtggatgttctccctgaccaattccgccagaaggcgctcgccgcccagcgaaagcagctcttgcaaggaagcaaaatttttcagcggttttaggccgtcggccgtgggcatgtttttcagcgtctgggtcagcagttccagcctgtcccacagctcggtgatgtgctctacggcatctcgatccagcagatctcctcgtttcgcgggttggggcggctttcgctgtagggcaccagccgatgggcgtccagcggggccagagtcatgtccttccatgggcgcagggtcctcgtcagggtggtctgggtcacggtgaaggggtgcgctccgggttgggcgctggccagggtgcgcttgaggctggttctgctggtgctgaatcgctgccgctcttcgccctgcgcgtcggccaggtagcatttgaccatggtctcgtagtcgagaccctcggcggcgtgccccttggcgcggagctttcccttggaggtggcgccgcacgaggggcactgcaggctcttcagggcgtagagcttgggagcgagaaacacggactctggggagtaggcgtccgcgccgcaggaagcgcagaccgtctcgcattccaccagccaagtgagctccgggcggtcagggtcaaaaaccaggttgcccccatgctttttgatgcgtttcttacctcggctctccatgaggcggtgtcccttctcggtgacgaagaggctgtccgtgtccccgtagaccgacttcaggggcctgtcttccagcggagtgcctctgtcctcctcgtagagaaactctgaccactctgagacgaaggcccgcgtccaggccaggacgaaggaggccacgtgggaggggtagcggtcgttgtccactagcgggtccaccttctccagggtgtgcaggcacatgtccccctcctccgcgtccagaaaagtgattggcttgtaggtgtaggacacgtgaccgggggttcccgacgggggggtataaaagggggtgggcgccctttcatcttcactctcttccgcatcgctgtctgcgagagccagctgctggggtaagtattccctctcgaaggcgggcatgacctcagcgctcaggttgtcagtttctaaaaatgaggaggatttgatgttcacctgtcctgaggtgatacctttgagggtacctgggtccatctggtcagaaaacactatttttttgttgtcaagcttggtggcgaacgacccgtagagggcgttggagagcagcttggcgatggagcgcagggtctggtttttgtcgcggtcggctcgctccttggccgcgatgttgagttgcacgtactcgcgggccacgcacttccactcggggaagacggtggtgcgctcgtctgggatcaggcgcaccctccagcctcggttgtgcagggtgaccatgtcgacgctggtggcgacctcgccgcgcaggcgctcgttggtccagcagaggcggccgcccttgcgcgagcagaaggggggtagggggtccagctggtcctcgtttggggggtccgcgtcgatggtgaagaccccggggagcaagcgcgggtcaaagtagtcgatcttgcaagcttgcatgtccagagcccgctgccattcgcgggcggcgagcgcgcgctcgtaggggttgaggggcgggccccagggcatggggtgggtgagcgcggaggcgtacatgccgcagatgtcatacacgtacaggggttccctgaggatgccgaggtaggtggggtagcagcgccccccgcggatgctggcgcgcacgtagtcatagagctcgtgggagggggccagcatgttgggcccgaggttggtgcgctgggggcgctcggcgcggaaggcgatctgcctgaagatggcatgggagttggaggagatggtgggccgctggaagacgttgaagcttgcttcttgcaagcccaccgagtccctgacgaaggaggcgtaggactcgcgcagcttgtgcaccagctcggcggtgacctggacgtcgagcgcgcagtagtcgagggtctcgcggatgatgtcatacttatcctcccccttctttttccacagctcgcggttgaggacgaactcttcgcggtctttccagtactcttggaggggaaacccgtccgtgtccgaacggtaagagcctagcatgtagaactggttgacggcctggtaggggcaacagcccttctccacgggcagcgcgtaggcctgcgccgccttgcggagggaggtgtgggtgagggcgaaagtgtccctgaccatgactttgaggtattgatgtttgaagtctgtgtcatcgcagccgccctgttcccacagggtgtagtccgtgcgctttttggagcgcgggttgggcagggagaaggtgaggtcattgaagaggatcttccccgctcgaggcatgaagtttctggtgatgcgaaagggccctgggaccgaggagcggttgttgatgacctgggcggccaggacgatctcgtcaaagccgtttatgttgtggcccacgatgtagagctccaaaaagcggggctggcccttgatggaggggagctttttgagttcctcgtaggtgagctcctcgggcgattccaggccgtgctcctccagggcccagtcttgcaagtgagggttggccgccaggaaggatcgccagaggtcgcgggccatgagggtctgcaggcggtcgcggaaggttctgaactgtcgccccacggccatcttttcgggggtgatgcagtagaaggtgagggggtctttctcccaggggtcccatctgagctctcgggcgaggtcgcgcgcggcggcgaccagagcctcgtcgccccccagtttcatgaccagcatgaagggcacgagctgcttgccaaaggctcccatccaagtgtaggtctctacatcgtaggtgacaaagaggcgctccgtgcgaggatgagagccgatcgggaagaactggatctcccgccaccagttggaggattggctgttgatgtggtgaaagtagaagtcccgtctgcgggccgagcactcgtgctggcttttgtaaaagcgaccgcagtactggcagcgctgcacgggttgtatatcttgcacgaggtgaacctggcgacctctgacgaggaagcgcagcgggaatctaagtcccccgcctggggtcccgtgtggctggtggtcttctactttggttgtctggccgccagcatctgtctcctggagggcgatggtggagcagaccaccacgccgcgagagccgcaggtccagatctcggcgctcggcgggcggagtttgatgacgacatcgcgcacattggagctgtccatggtctccagctcccgcggcggcaggtcagctgggagttcctggaggttcacctcgcagagacgggtcaaggcgcgggcagtgttgagatggtatctgatttcaaggggcgtgttggcggcggagtcgatggcttgcaggaggccgcagccccggggggccacgatggttccccgcggggcgcgaggggaggcggaagctgggggtgtgttcagaagcggtgacgcgggcgggcccccggaggtagggggggttccggccccacgggcatgggcggcaggggcacgtcttcgccgcgcgcgggcaggggctggtgctggctccgaagagcgcttgcgtgcgcgacgacgcgacggttggtgtcctgtatctggcgcctctgagtgaagaccacgggtcccgtgaccttgaacctgaaagagagttcgacagaatcaatctcggcatcgttgacagcggcctggcgcaggatctcctgcacgtcgcccgagttgtcctggtaggcgatctctgccatgaactgctcgatctcttcctcctggagatctcctcgtccggcgcgctccacggtggccgccaggtcgttggagatgcgacccatgagctgcgagaaggcgttgagcccgccctcgttccagacccggctgtagaccacgcccccctcggcgtcgcgggcgcgcatgaccacctgggccaggttgagctccacgtgtcgcgtgaagacggcgtagttgcgcaggcgctggaaaaggtagttcagggtggtggcggtgtgctcggcgacgaagaagtacatgacccagcgccgcaacgtggattcattgatgtcccccaaggcctccaggcgctccatggcctcgtagaagtccacggcgaagttgaaaaactgggagttgcgagcggacacggtcaactcctcctccagaagacggatgagctcggcgacagtgtcgcgcacctcgcgctcgaaggccacggggggcgcttcttcctcttccacctcttcttccatgatcgcttcttcttcttcctcagccgggacgggagggggcggcggcggcgggggaggggcgcggcggcggcggcggcgcaccgggaggcggtcgatgaagcgctcgatcatctccccccgcatgcggcgcatggtctcggtgacggcgcggccgttctcccgggggcgcagctcgaagacgccgcctctcatctcgccgcggggcgggcggccgtgaggtagcgagacggcgctgactatgcatcttaacaattgctgtgtaggtacgccgccgagggacctgattgagtccagatccaccggatccgaaaacctttggaggaaagcgtctatccagtcgcagtcgcaaggtaggctgagcaccgtggcgggcgggggcgggtctggagagttcctggcggagatgctgctgatgatgtaattaaagtaggcggtcttgagaaggcggatggtggacaggagcaccatgtctttgggtccggcctgttggatgcggaggcggtcggccatgccccaggcctcgttctgacaccggcgcaggtctttgtagtagtcttgcatgagtctttccaccggcacctcttctccttcctcttctccatctcgccggtggtttctcgcgccgcccatgcgcgtgaccccaaagcccctgagcggctgcagcagggccaggtcggcgaccacgcgctcggccaagatggcctgctgcacctgagtgagggtcctctcgaagtcatccatgtccacgaagcggtggtaggcgcccgtgttgatggtgtaggtgcagttggccatgacggaccagttgacggtctggtgtcccggctgcgagagctccgtgtaccgcaggcgcgagaaggcgcgggaatcgaacacgtagtcgttgcaagtccgcaccagatactggtagcccaccaggaagtgcggcggaggttggcgatagaggggccagcgctgggtggcgggggcgccgggcgccaggtcttccagcataaggcggtggtatccgtagatgtacctggacatccaggtgatgccggcggcggtggtggtggcgcgcgcgtagtcgcggacccggttccagatgtttcgcaggggcaagaagtgttccatggtcggcacgctctggccggtgaggcgcgcgcagtcgttgacgctctatacacacacaaaaacgaaagcgtttacagggctttcgttctgtagcctggaggaaagtaaatgggttgggttgcggtgtgccccggttcgagaccaagctgagctcggccggctgaagccgcagctaacgtggtattggcagtcccgtctcgacccaggccctgtatcctccaggatacggtcgagagcccttttgctttcttggccaagcgcccgtggcgcgatctgggatagatggtcgcgatgagaggacaaaagcggctcgcttccgtagtctggagaaacaatcgccagggttgcgttgcggcgtaccccggttcgagcccctatggcggcttggatcggccggaaccgcggctaacgagggccgtggcagccccgtcctcaggaccccgccagccgacttctccagttacgggagcgagccccttttgtttttttattttttagatgcatcccgtgctgcggcagatgcgcccctcgccccggcccgatcagcagcagcaacagcaggcatgcagacccccctctcccctttccgccccggtcaccacggccgcggcggccgtgtcgggcgcggggggcgcgctggagtcagatgagccaccgcggcggcgacctaggcagtatctggacttggaagagggcgagggactggcgcggctgggggcgaactctccagagcgccacccgcgggtgcagttgaaaagggacgcgcgcgaggcgtacctgccgcggcagaacctgtttcgcgaccgcgggggcgaggagcccgaggagatgcgagactgcaggttccaagcggggcgcgagctgcggcgcgggctggacagacagcgcctgctgcgcgaggaggactttgagcccgacacgcagacgggcatcagccccgcgcgcgcgcacgtagccgcggccgacctggtgaccgcctacgagcagacggtgaaccaggagcgcaacttccaaaagagcttcaacaaccacgtgcgcacgctggtggcgcgcgaggaggtgaccctgggtctcatgcatctgtgggacctggtggaggcgatcgtgcagaaccccagcagcaagcccctgaccgcgcagctgttcctggtggtgcagcacagcagggacaacgaggccttcagggaggcgctgctgaacatcaccgagccggaggggcgctggctcctggacctgataaacatcctgcagagcatagtggtgcaggagcgcagcctgagcctggccgagaaggtggcggccatcaactactctatgctgagcctgggcaagttctacgcccgcaagatctacaagaccccctacgtgcccatagacaaggaggtgaagatagacagcttctacatgcgcatggcgctgaaggtgctgaccctgagcgacgacctgggagtgtaccgcaacgagcgcatccacaaggccgtgagcgccagccggcggcgcgagctgagcgaccgcgagctgatgcacagtctgcagcgcgcgctgaccggcgcgggcgagggcgacagggaggtcgagtcctacttcgacatgggggccgacctgcactggcagccgagccgccgcgccctggaggcggcgggggcgtacggcggccccctggcggacgatgaccaggaagaggaggactatgagctagaggagggcgagtacctggaggactgacctggctggtggtgttttggtatagatgcaagatccgaacgtggcggacccggcggtccgggcggcgctgcagagccagccgtccggcattaactcctctgacgactgggccgcggccatgagtcgcatcatggccctgaccgcgcgcaaccccgaggctttcaggcagcagcctcaggccaaccggctggcggccatcttggaagcggtagtgcccgcgcgctccaaccccacccacgagaaggtgctggccatagtcaacgcgctggcggagagcagggccatccgcgcggacgaggccggactggtgtacgatgcgctgctgcagcgggtggcgcggtacaacagcggcaacgtgcagaccaacctggaccgcctggtgacggatgtgcgcgaggccgtggcgcagcgcgagcgcttgcatcaggacggtaacctgggctcgctggtggcgctaaacgccttcctcagcacccagccggccaacgtaccgcgggggcaggaggactacaccaactttttgagcgcgctgcggctgatggtgaccgaggtccctcagagcgaggtgtaccagtcggggcccgactacttcttccagaccagcagacagggcttgcaaaccgtgaacctgagccaggctttgaagaacctgcgggggctgtggggagtgaaggcgcccaccggcgaccgggctacggtgtccagcctgctaacccccaactcgcgcctgctgctgctgctgatcgcgcccttcacggacagcgggagcgtctcgcgggaaacctatctgggccacctgctgacgctgtaccgcgaggccatcgggcaggcgcaggtggacgagcacaccttccaagagatcaccagcgtgagccacgcgctggggcaggaggacacgggcagcctgcaggcgaccctgaactacctgctgaccaacaggcggcagaagattcccacgctgcacagcctgacgcaggaggaggagcgcatcttgcgctacgtgcagcagagcgtgagcctgaacctgatgcgcgacggcgtgacgcccagcgtggcgctggacatgaccgcgcgcaacatggaaccgggcatgtacgcctcccaccggccgttcattaaccgcctgatggactacttgcatcgggcggcggccgtgaaccccgagtacttcactaatgccattctgaatccccactggatgccccctccgggtttctacaacggggacttcgaggtgcccgaggttaacgacgggttcctctgggatgacatggatgacagtgtgttctcacccaacccgctgcgcgccgcgtctctgcgattgaaggagggttctgacagggaaggaccgaggagtctggcctcctccctggctctgggagcggtgggcgcggcggcgcggggcagtagccccttccccagcctggcagactctctgaacagcgggcgggtgagcaggccccgcttgctaggcgaggaggagtatctgaacaactccctgctgcagcccgcgagggacaaaaacgctcagcggcagcagtttcccaacaatgggatagagagcctggtggacaagatgtccagatggaagacgtatgcgcaggagtacaaggagtgggaggaccgccagccgcggcccctgccgccccctaggcagcgctggcagcggcgcgcgtccaaccgccgctggaggcaggggcccgaggacgatgatgactctgcagatgacagcagcgtgctggacctgggcgggagcgggaaccccttttcgcacctgcgcccccgcctgggcaagatgttttaaaagagaaaaaataaaaactcaccaaggccatggcgacgagcgttggttttttgttcccttccttagtatgcgacgcgcggcgatgttcgaggaggggcctcccccctcttacgagagcgcgatgggattttctcctgcgacgcccctacagcctccctacgtgcctcctcggtacctgcaacctaccgggggaagaaatagcatctgttactctgagctgcagcccctgtatgacaccaccaaagtgtacctggtggacaacaagtctgcggacgtggcctccctgaactaccagaacgaccacagcgattttttgaccaccgtgatccaaaacaatgacttcaccccaaacgaggccagcacccagaccataaacctggacaacaggtcgcactggggcggtgatctgaagaccatcttgcacaccaacatgcccaacgtgaatgagtttatgtttactaactcttttaaggcgcgggtaatggtggcgcgcgacgataagggagtgcctaaatacgagtgggtggactttacactgcccgagggcaactactccgagatcatgactcttgacctgatgaacaacgcgatcgtggagcactacttgaaagtaggcaggcagaacggggtaaaagaaagcgatattggagttaagtttgacaccaggaactttcgcctgggatgggaccccgagacggggttggttatgcccggggtttacactaatgaagcttttcaccccgatatagtgctcttgcccggatgcggggtggacttcacccaaagccggctgagcaacctgctgggcattcgaaagcgccagccattccaggaggggtttcaaatcacttatgagcatttggaagggggcaacattccggcgcttctggatttggtcgcctacgaggagagtttgaaatccgaggaaagcggggataacactgacaagggcggcgaggagcaagccggcgatggcgacactgcttcggtagaaaacgaaagtgcgtccgtggtggaggcggcggcggtagcgaccgcagagccggagaccgtagaggaggatatgaatgatagcgcaatcagaggagactcgtttattccccggggcgaagaaaagaaggcggaggctgcggcagcagtcgaagcagagcccaaagtcgagtcggagatcatggaggaggatttgaatgataacgcgatcagaggtgatacgtttgtgccgcggggcgaagaaaaaaaagcggaggcggaggccgcggctgaggaggcggccgaggctgtggcagccaccgcggcggtgactgaaacaactgaggagcaggttcaggccgagcaggttcaaaagaagcccgtgattaaagccctaacacaagatagcaaggagcgcagttacaacttgattcccggtagtactgacaccgagtaccgcagctggtacctggcatacaactacggcgacccggtcaaaggggtgcgctcgtggactctgctttgcacgccggacgtcacctgcggctccgagcagatgtactggtcgttgccaaacatgatgcaagacccggtgaccttccgctccacgcggcaggttaacaacttcccggtggtgggcgccgaactgctgcccgtgcactccaagagcttttacaacgagcaggccgtgtactcccagctgatccgccaggccacctctctgacccacgtgttcaatcgctttcccgagaaccagattttggcgcgcccgccggcccccaccatcactaccgtcagtgaaaacgttcctgctctcacagatcacgggacgctaccgctgcgcaacagcatctcaggagtccagcgagtgaccattactgacgccagacgccggacctgcccctacgtttacaaggccttgggcatagtctcgccgcgcgtcctctccagccgcactttttaaaacacatattcacccacgcttcaaagattatgtctatacttatctcacccagcaataacaccggctgggggctgcgcgcgcccagcaagatgtttggaggggcgagaaaacgttccgagcagcacccagtgcgcgtgcgcggccactaccgcgcgccctggggagcgcacaagcgcgggcgcgcagggcgcaccactgtggacgacgccattgactccgtagtggagcaggcgcgccactacacacccggcgcgccgtccgcccccgccgtgtccaccgtggacgaggcgatcgaaagcgtggtacagggcgcgcggcactatgccaaccttaaaaatcgccgccgtcgcgtggcccgccgccatcgccggagaccccgggccaccgccgccgcgcgccttgctaaggctctactcaggcgcgccaggcgaactggccgccgggccgccatgagggccgcacggcgggctgccgccagtgcggccgccgcggccccacgggcacgaaggcgcgcggccgctgccgccgccgccgccatttccagcttggcctcaacgcggcgcggtaacatatactgggtgcgcgactcgataaccggcacgcgggtacccgtgcgctttcgccccccgcggaattagcacaagacaacatacacactgagtctcctgctgttgtgtatcccagcggcgaccgtcagcagcggcgacatgtccaagcgcaaaattaaagaagagatgctccaggtcatcgcgccggagatctatgggcccccgaagaaggaggaggatgattacaagccccgcaagctaaagcgggtcaaaaagaaaaagaaagatgatgatgatgacgaggcggtggagtttgtccgccgcatggcacccaggcgccccgtgcagtggaagggtcggcgcgtgcagcgcgttttgcgccccggcaccgcggtggtcttcacgcccggcgagcgctccacgcgcactttcaagcgggtgtacgatgaggtgtacggcgacgaggacctgttggagcaggccaaccagcgctttggggagtttgcatatgggaaacggccccgcgagagtctaaaagaggacctgctggcgctaccgctggacgagggcaatcccaccccgagtctgaagccggtgaccctgcaacaggtgctgcctttgagcgcgcccagcgagcataagcgagggttgaagcgcgagggcggggacctggcgcccaccgtgcagttgatggtgcccaagcggcagaagctggaggacgtgctggagaaaatgaaagtagagcccgggatccagcccgagatcaaggtccgccccatcaagcaggtggcgcccggcgtgggagtccagaccgtggacgttaggattcccacggaggagatggaaacccaaaccgccactccctcttcagcggccagcgccaccaccggcaccgcttcggtagaggtgcagacggacccctggctacccgccgccgctgtcgccgccgccgccgccccccgttctcgcgggcgcaagagaaattatccagtggccagcgcgctcatgccccagtacgcactgcatccatccatcgcgcccacccccggctaccgcgggtattcgtaccgcccgcgcagatcggccggcactcgcggccgccgccgccgtgcgaccacaaccagccgccgccgtcgccgccgccgccagccagtgctgacccccgtgtctgtaaggaaggtggctcgctcggggagcacgctggtggtgcccagagcgcgctaccaccccagcatcgtttaaagccggtctctgtatggttcttgcagatatggccctcacttgtcgcctccgcttcccggtgccgggataccgaggaagaactcaccgccgcagaggcatggcgggcagcggtctccgcggcggccgtcgccatcgccggcgcgcaaaaagcaggcgcatgcgcggcggtgtgctgcctctgctaatcccgctaatcgccgcggcgatcggtgccgtacccgggatcgcctccgtggccctgcaggcgtcccagaaacgttgactcttgcaaccttgcaagcttgcatttttttggaggaaaaaataaaaaagtctagactctcacgctcgcttggtcctgtgactattttgtagaaaaaagatggaagacatcaactttgcgtcgctggccccgcgtcatggctcgcgcccgttcatgggagactggacagatatcggcaccagcagtatgagcggtggcgccttcagctggggcagtctgtggagcggccttaaaaattttggttccaccattaaaaactatggcaacaaagcgtggaacagcagcacgggccagatgctaagagacaagttgaaagagcagaacttccaggagaaggtggcgcagggcctggcctctggcatcagcggggtggtggacatagctaaccaggccgtgcagaaaaagataaacagtcatctggacccccgccctcaggtggaggaaacgcctccagccatggagacggtgtttcccgagggcaaaggcgaaaagcgcccgcggcccgacagggaagagaccctggtgtcacacaccgaggagccgccctcttacgaggaggcactcaaggccggcctgcccaccactcgccccgtagctcccatggccacaggtgtggtgggccataaacaacacacccccgcaacactagatctgcccccgccgtccgagccgccgcgtcagccaaagacggcgacggtgcccgctccctccacttccgccgccaacagagtgtccctgcgccgcactacgggcgcccctcggggaccgcgactgagcggcaactggcagagcacactgaacagcattgtgggcctgggagtgaaaagtgtgaagcgccgccgttgctactgaatgagcaagctagctaacgtgttatatgtgtgtatgcgtcctatgtcgccgccagaggagctgttgagccgcccgcgccgtctgcactccagcgaatttcaagatggcgaccccttcgatgatgccacagtggtcgtacatgcacatctcgggccaggacgcctcggagtacctgagccccgggctggtgcagttcgcccgcgccaccgacagctacttcagcctaagtaacaaatttaggaaccctacggtggcacccacccacgatgtgaccacggaccggtcgcagcgcctgacgctgcggtttatccccgtggatcgggaggacactgcctactcttacaaggcgcgcttcacgctagccgtgggcgacaaccgcgtgctggacatggcctccacctactttgatatccggggtgtgctggacaggggtcccacctttaagccctactcgggcactgcctacaactccctggctcctaaaggcgctcccaattcttgcgagtgggatgaaaaaactaatactgctgaagcagccattgaaaatgaagaagagctggcggatgagccagaagagcaagcagaagaggctataaaaaccaatgtgtttgcccaggcgccatattctggcaatgcaatttccaaagaaggaatacaagtaggcatagaaggcattggagagcaagtaaaagccgtatacgcagacaaaacctaccagccggaacctcaggttggagaaactcaatggaatgagactgaaataaatcatggagcaggaagggtgctgaagaagaccactcccatgaagccttgctatggttcttatgctaaacctactaatgaatatggaggccagggcatccttgtagaaaaaaatggcaaaatggaaagccaggtggaaacacagttttttgctcttgacggtgaaaatgataatagtccaaaagtggtgttgtatagcgaagatgtaaacttggatactcctgacacacacctatcatacaaacctagcgcccaagatgtaaactctaaagaaatgttgggccaacaggccatgcccaacaggccaaatcttattgcttttagggacaactttattggacttatgtactacaacagcactggcaacatgggagtgctggcaggacaggcctcccaactaaatgccgtggtagacttgcaagacagaaacacagagttgtcataccagctgatgcttgattccattggagacagatcaagatattttgccatgtggaaccaggcggttgatagttacgatccagatgttagaattattgaaaaccatggcacagaggatgaacttccaaactactgttttcctttgggaggaatatttaatactcagagttttaaaaaggtaaaacctggaacggataacggatgggaaacagatgatgacttttcagataaaaatgaaataagagttggcaacaactttgccatggagatcaatatccaggcaaacctgtggagaagcttcttgtattccaatgtggctctctacctgccagataagatgaagtactctccaaccaacatagacatttccaccaacactaacacctatgactacatgaacaaaagagtggcgcctccaggcctggtggactgctatgtcaatctgggggccaggtggtcccttgatgtaatggataacatgaacccctttaaccaccaccgcaatgcgggcctgcgataccgttccatgcttctgggtaacggccgctacgtgcccttccacatccaggtgccccaaaagttctttgccatcaaaagccttctactcttgcctggctcgtacacctacgaatggaatttcagaaaggatgtgaacatggtcctacagagctctctgggcaacgaccttagggtggatggggccagcatcaagtttgacagcatcaccctttatgctacctttttccccatggcccacaacaccgcttccacgcttgaggccatgctcagaaacgacaccaacgaccagtccttcaatgactacctctctggggccaacatgctctaccccatccccgccaacgctaccaacgtgcccatctccattccctctcgcaactgggccgccttcagaggctgggcatttacccgccttaagaccaaggagaccccctccctgggctcgggttttgacccctactttgtctactcgggatccatcccctacctggatggcaccttctacctcaaccacacttttaagaagatatccatcatgtatgactcctctgtcagctggccgggcaacgaccgcctgctcacccccaatgagttcgaggtcaagcgcgccgtggacggcgagggctacaacgtggcccagtgcaacatgaccaaggactggttcctggtgcagatgctggccaactacaacataggctaccagggcttctacatcccagagagctacaaggacaggatgtactccttcttcagaaatttccaacccatgagcaggcaggtggtggacgagaccaaatacaaggactatcaggccgttggcatcactcaccagcacaacaactcgggattcgtgggctacctggcacccaccatgcgcgagggacaggcctaccccgccaacttcccctaccccttgataggcaagaccgcggtcgacagcgtcacccagaaaaagttcctctgcgaccgcaccctctggcgcatccccttttctagcaacttcatgtccatgggcgcgctcacggacctgggccagaacctgctctatgccaactccgcccatgcgctggacatgacttttgaggtggaccccatggacgagcccacccttctctatattgtgtttgaagtgttcgacgtggtcagagtgcaccagccgcaccgcggtgtcatcgagaccgtgtacctgcgcacgcccttctcggccggcaacgccaccacctaaggagacagcgccgccgcctgcatgacgggttccaccgagcaagagctcagggccatcgccagagacctgggatgcggaccctattttttgggcacctatgacaaacgcttcccgggcttcatctcccgagacaagctcgcctgcgccatcgtcaacacggccgcgcgcgagaccgggggcgtgcactggctggcctttggctgggacccgcgctccaaaacttgctacctctttgacccttttggcttctccgatcagcgcctcaagcagatctatgagtttgagtacgaggggctgctgcgccgcagcgcgcttgcctcctcgcccgaccgctgcatcacccttgagaagtccaccgagaccgtgcaggggccccactcggccgcctgcggtctcttctgctgcatgtttttgcacgcctttgtgcgctggccccagagtcccatggatcgcaaccccaccatgaacttgctcaagggagtgcccaacgccatgctccagagcccccaggtccagcccaccctgcgccacaaccaggaacagctctaccgcttcctggagcgccactccccctacttccgcagtcacagcgcgcgcatccggggggccacctctttctgccacttgcaagaaaacatgcaagacggaaaatgatgtacagctcgctttttaataaatgtaaagactgtgcactttatttatacacgggctctttctggttatttattcaacaccgccgtcgccatctagaaatcgaaagggttctgccgcgcgtcgccgtgcgccacgggcagagacacgttgcgatactggaagcggctcgcccacttgaactcgggcaccaccatgcggggcagtggttcctcggggaagttctcgccccacagggtgcgggtcagctgcagcgcgctcaggaggtcgggagccgagatcttgaagtcgcagttggggccggaaccctgcgcgcgcgagttgcggtacacggggttgcagcactggaacaccagcagggccggattatgcacgctggccagcaggctctcgtcgctgatcatgtcgctgtccagatcctccgcgttgctcagggcgaatggggtcatcttgcagacctgcctgcccaggaaaggcggcagcccgggcttgccgttgcagtcgcagcgcaggggcatcagcaggtgcccgcggcccgactgcgcctgcgggtacagcgcgcgcatgaaggcttcgatctgcctgaaagccacctgcgccttggctccctccgaaaagaacatcccacaggacttgctggagaactggttcgcgggacagctggcatcgtgcaggcagcagcgcgcgtcggtgttggcgatctgcaccacgttgcgaccccaccggttcttcactatcttggccttggaagcctgctccttcagcgcgcgctggccgttctcgctggtcacatccatctctatcacctgctccttgttgatcatgtttgtcccgtgcagacacttcaggtcgccctccgtctgggtgcagcggtgctcccacagcgcgcaaccggtgggctcccaattcttgtgggtcacccccgcgtaggcctgcaggtaggcctgcaagaagcgccccatcatggccacgaaggtcttctggctcgtaaaggtcagctgcaggccgcgatgctcttcgttcagccaggtcttgcagatggcggccagcgcctcggtctgctcgggcagcatcctaaaatttgtcttcaggtcgttatccacgtggtacttgtccatcatggcgcgcgccgcctccatgcccttctcccaggcggacaccatgggcaggcttagggggtttatcacttccaccggcgaggacaccgtactttcgatttcttcttcctccccctcttcccggcgcgcgcccacgctgctgcgcgctctcaccgcctgcaccaaggggtcgtcttcaggcaagcgccgcaccgagcgcttgccgcccttgacctgcttaatcagcaccggcgggttgctgaagcccaccatggtcagcgccgcctgctcttcttcgtcttcgctgtctaccactatctctggggaagggcttctccgctctgcggcggtgcgcttcttttttttcttgggagcagccgtgacggagtccgccacggcgacggaggtcgagggcgtggggctgggggtgcgcggtaccagggcctcgtcgccctcggactcttcctctgactccaggcggcggcggagtcgcttctttgggggcgcgcgcgtcagcggcggcggagacggggacggggacggggacgggacgccctccacagggggtggtcttcgcgcagacccgcggccgcgctcgggggtcctctcgagctggtcttggtctcgactggccattgtatcctcctcctcctaggcagagagacataaggagtctatcatgcaagtcgagaaggaggagagcttaaccaccccctctgacaccgccgatgcgcccgccgtcgccgtcgcccccgctgccgccgacgcgcccgccacaccgagcgacacccccgcggacccccccgccgacgcacccctgttcgaggaagcggccgtggagcaggacccgggctttgtctcggcagaggaggatttgcgagaggaggagaataaggagaagaagccctcagtgccaaaagatgataaagagcaagacgagcacgacgcagatgcacaccagggtgaagtcgggcggggggacggagggcatggcggcgccgactacctagacgaagggaacgacgtgctcttgaagcacctgcatcgtcagtgcgccatcgtttgcgacgctctgcaggagcgcagcgaagtgcccctcagcgtggcggaggtcagccacgcctacgagctcagcctcttctccccccgggtgcccccccgccgccgcgaaaacggcacatgcgagcccaacccgcgcctcaacttctaccccgccttcgtggtgcccgaggtcctggccacctatcacatcttctttcaaaattgcaagatccccctctcgtgccgcgccaaccgtagccgcgccgataagatgctggccctgcgccagggcgaccacatacctgatatcgccgctttggaagatgtgccaaagatctttgagggtctgggtcgcaacgagaagcgggcagcaaactctctgcaacaggaaaacagcgaaaatgagagtcacaccggggtactggtggagctcgagggcgacaacgcccgcctggcggtggtcaagcgcagcatcgaggtcacccactttgcctaccccgcgctaaacctgccccccaaagtcatgaacgcggccatggacgggctgatcatgcgccgcggccggcccctcgctccagatgcaaacttgcatgaggagaccgaggacggccagcccgtggtcagcgacgagcagctggcgcgctggctggagaccgcggaccccgccgaactggaggagcggcgcaagatgatgatggccgcggtgctggtcaccgtagagctggagtgtctgcagcgcttcttcggcgaccccgagatgcagagaaaggtcgaggagaccctgcactacaccttccgccagggctacgtgcgccaggcttgcaagatctccaacgtggagctcagcaacctggtgtcctacctgggcatcttgcatgagaaccgcctcgggcagagcgtgctgcactccaccctgcgcggggaggcgcgccgcgactacgtgcgcgactgcgtttacctcttcctctgctacacctggcagacggccatgggggtctggcagcagtgtctggaggagcgcaacctcaaagagctggagaagctcctgcagcgcgcgctcaaagacctctggacgggctacaacgagcgctcggtggccgccgcgctggccgacctcatcttccccgagcgcctgctcaaaaccctccagcaggggctgcccgacttcaccagccaaagcatgttgcaaaacttcaggaactttatcctggagcgttctggcatcctacccgccacctgctgcgccctgcccagcgactttgtccccctcgtgtaccgcgagtgccccccgccgctgtggggtcactgctacctgttccaactggccaactacctgtcctaccacgcggacctcatggaggactccagcggcgaggggctcatggagtgccactgccgctgcaacctctgcacgccccaccgctccctggtctgcaacacccaactgctcagcgagagtcagattatcggtaccttcgagctacagggtccgtcctcctcagacgagaagtccgcggctccggggctaaaactcactccggggctgtggacttccgcctacctgcgcaaatttgtacctgaagactaccacgcccacgagatcaggttttacgaggaccaatcccgcccgcccaaggcggagctgaccgcctgcgtcatcacccagggcgagatcctaggccaattgcaagccatccaaaaagcccgccaagattttttgctgaagaagggtcggggggtgtatctggacccccagtcgggtgaggagctcaacccggttcccccgctgccgccgccgcgggaccttgcttcccaggataagcatcgccatggctcccagaaagaagcagcagcggccgccactgccgccaccccacatgctggaggaagaggaggaatactgggacagtcaggcagaggaggtttcggacgaggaggagccggagacggagatggaagagtgggaggaggacagcttagacgaggaggcttccgaagccgaagaggcagacgcaacaccgtcaccctcggccgcagccccctcgcaggcgcccccgaagtccgctcccagcatcagcagcaacagcagcgctataacctccgctcctccaccgccgcgacccacggccgaccgcagacccaaccgtagatgggacaccaccggaaccggggccggtaagtcctccgggagaggcaagcaagcgcagcgccaaggctaccgctcgtggcgcgctcacaagaacgccatagtcgcttgcttgcaagactgcggggggaacatctccttcgcccgccgcttcctgctcttccaccacggtgtggccttcccccgtaacgtcctgcattactaccgtcatctctacagcccctactgcggcggcagtgagccagagacggtcggcggcggcggcgcccgtttcggcgcctaggaagacccagggcaagacttcagccaagaaactcgcggcggccgcggcgaacgcggtcgcgggggccctgcgcctgacggtgaacgaacccctgtcgacccgcgaactgaggaaccgaatcttccccactctctatgccatcttccagcagagcagagggcaggatcaggaactgaaagtaaaaaacaggtctctgcgctccctcacccgcagctgtctgtatcacaagagcgaagaccagcttcggcgcacgctggaggacgctgaggcactcttcagcaaatactgcgcgctcactcttaaggactagctccgcgcccttctcgaatttaggcgggaacgcctacgtcatcgcagcgccgccgtcatgagcaaggacattcccacgccatacatgtggagctatcagccgcagatgggactcgcggcgggcgcctcccaagactactccacccgcatgaactggctcagtgccggcccacacatgatctcacaggttaatgatatccgcacccatcgaaaccaaatattggtggagcaggcggcgattaccaccacgccccgcaataatcccaaccccagggagtggcccgcgtccctggtgtatcaggaaattcccggccccaccaccgtactacttccgcgtgattcccaggccgaagtccaaatgactaactcaggggcgcagctcgcgggcggctgtcgtcacagggtgcggccccctcgccagggtataactcacctggagatccgaggcagaggtattcagctcaacgacgagtcggtgagctcctcgctcggtctcagacctgacgggaccttccagatagccggagccggccgatcttccttcacgccccgccaggcgtacctgactctgcagagctcgtcctcggcgccgcgctcgggcggcatcgggactctccagttcgtgcaggagtttgtgccctcggtctacttcaaccccttctccggctctcccggtcgctacccggaccagttcatctcgaactttgacgccgcgagggactcggtggacggctacgactgaatgtcgggtggacccggtgcagagcaacttcgcctgaagcacctcgaccactgccgccgccctcagtgctttgcccgctgtcagaccggtgagttccagtacttttccctgcccgactcgcacccggacggcccggcgcacggggtgcgctttttcatcccgagtcaggtgcgctctaccctaatcagggagtttaccgcccgtcccctactggcggagttggaaaaggggccttctatcctaaccattgcctgcatctgctctaaccctggattgcaccaagatctttgctgtcatttgtgtgctgagtataataaaggctgagatcagaatctactcgggctcctgtcgccatcctgtcaacgccaccgtccaagcccggcccgatcagcccgaggtgaacctcacctgcggtctgcaccggcgcctgagaaaatacctagcttggtactacaacagcactccctttgtggtttacaacagctttgaccaggacggggtctcactgagggataacctctcgaacctgagctactccatcaggaagaacagcaccctcgagctacttcctccttacctgcccgggacttaccagtgtgtcaccggtccctgcacccacacccacctgttgatcgtaaacgactctcttccgagaacagacctcaataactcctcttcgcagttccccagaacaggaggtgagctcaggaaaccccgggtaaagaagggtggacaagagttaacacttgtggggtttctggtgtatgtgacgctggtggtggctcttttgattaaggcttttccttccatgtctgaactctccctcttcttttatgaacaactcgactagtgctaacgggaccctacccaacgaatcgggattgaatatcggtaaccaggttgcagtttcacttttgattaccttcatagtcctcttcctgctagtgctgtcgcttctgtgcctgcggatcgggggctgctgcatccacgtttatatctggtgctggctgtttagaaggttcggagaccatcgcaggtagaataaacatgctgctgcttaccctctttgtcctggcgctggccgccagctgccaagccttttccgaggctgattttatagaaccccagtgcaatatcacttataaatctgaatataacctctgcactatcctaattaaatgcgttactcaacacgatgaggtaactgttagatacaaagatcaatcaaaaagagacgcactttacagcagctggcaaccaggagatgaacaaaaatacaatgtgaccgtcttccagggcaaactctccaaaacttacaattacactttcccattcgaggagatgtgtgagtttgtcatgttcatgtcaaagcagtacaagatgtggcctccgactccccagggctgtgtggaaaatccaggctctttctgcatgatctctctctgtgtaactgtgctggcactaatactcacgcttttgtatatcagatttaaatcaaggcaaagcttcatcgatgaaaagaaaatgccttaatcgcttttcacgcttgattgctaacaccgggtttttatccgcagaatgattggaatcaccctactaatcacctccctccttgcgattgcccatgggttggaacgaatcgaagtccctgtgggggccaatgttaccctggtggggcctgtcggcaatgctacattaatgtgggaaaaatatactaaaaatcaatgggtctcttactgcactaacaaaaacagccacaagcccagagccatctgcgatgggcaaaatttaaccttgattgatgttcaattgctggatgcgggctactattatgggcagctgggtacaatcgttaattactggagaccccacaaagattacatgcttcacgtagtaaagggtccccttagcagcccgaccactaccaccacctctaccacacccactaccaccactactcccatcaccagcactgccacccagcctcctcatagcagaacaaccacttttatcaattccaagtcccactccccccacattgccggcgggccctccgcctcaaactccgagaccaccgagatctgcttctgcaaatgctctgacgccattgcccaggatttggaagaccacgaggaagatgagcatgacttcgcagatgcatgccaggcatcaggggcagaagcactgccggtggccctcaaacagtatgcagactcccataccacccccgatcttccaccgccttcccagaagccaagtttcctgggggaaaatgaaacactgcctctctccatacttgctttgacatctgttgctattctgactgctctgctggtgctcctatgctctatatgctacctgatctgctgcaggaagaaaaaatctcacggccatgctcaccagccgcttatgcacttcccttaccctccagagttgggcgaccacaaactttaagtctgcagtagctatctgcccatcccttgtcagtcgacagcgatgagccccactaatctaacggcctctggacttacaacattgtctcttaatgagaccaccgctcctcaagacctgtacgatggtgtctccgcgctggttaaccagtgggatcacctgggcatatggtggctcctcataggagcagtgaccctgtgcctaatcctggtctggataatctgctgcatcaaaagcagaagacccaggcggcggcccatctacaggcccttcgtcatcacacctgaagatgatgatggcaccacgtccaggctgcagagcctaaagcagctactcttctcttttacagcatggtaaattgaacatgcctcgcattttcatctacttgtttcttcttccactctttttgggctcttctacattggcagctgtgtcccacatcgaggtagactgcatctcgcccttctcagtctacttactcttcggctttgtcatttgcaactttgtctgcagcgttatcactgtagtgatctgcttcatacagtgcatcgactacgtctgcgtacgggtggcctattttagacaccacccccagtatcgcaacagggacatagcggctctcctaagacttgtttaaatcatgcccaaattaactgtgattgctcttctgattatctgctgcgtcctagccgcgattgggactcagcctactaccaccaccaccagcgctcccagaaagagacatgtttcctgcagcttcaaacgtccctggaatataccccaatgctttactgatgaacctgaaatctctttggcttggtacttcagcgtcaccgcccttctcatcttctgcagtacggttattgcccttgccatttacccttcccttgacctgggctggaatgctgtcaactctatggaatatcccaccttcccagaaccagacctgccagacctggttgttctaaacgcgtttcctcctcctcccgttcaaaatcagtttcgccctccgtccccgacgcccactgaggtcagctactttaatctaacaggcggagatgactgaaaacctagacctagaaatggacggcctctgcagcgaacaacgcatactagagaggcgccggcaaaaagcagagctcgagcgtcttaaacaagagctccaagacgcggtggccatacaccagtgcaaaaaaggtgtcttctgtctagtgaaacaggccacgctcacctatgaaaaaacaggtgacacccaccgcctaggatacaagctgcccacacaacgccagaagttcgcccttatgataggcgaacaacccatcaccgtcacccagcactctgtggagacagaaggctgcatacacgctccctgcaggggcgctgactgtctctacaccttgatcaaaaccctctgcggccttagagacctcatccctttcaattgatcataactgtaatcaataaaaaatcacttacttgaaatctgatagcaagcctctgtccaattttttcagcaacacttccttcccctcctcccaactctggtactctaggcgcctcctagctgcaaacttcctccacagtctgaagggaatgtcagattcctcctcctgtccctccgcacccacgatcttcatgttgttgcagatgaaacgcgcgagatcgtctgacgagaccttcaaccccgtgtacccctacgataccgagatcgctccgacttctgtcccttttcccacccctccctttgtgtcccccgcaggaatgcaagaaaacccccctggagtgctatccctacgccttgcagaacccttgaccacctccaatggagcgctgaccctaaaaatggggggtggtttgaccctggacgaagaaggaaagcttacttcccaaaatattaccagtgttgatcctcctcttaaaaaaacaaaaaacaatatcagtctgcagactgcctccccccttgccgtcagctcgggagccctcacacttttcgctactcctcccctggcagttaatgacaataacctaactgtgcagtctcaggctccccttacactggaaaactcaaaactaagtctggccaccaaaggccccctaaccgtttctgaaggaaaacttgccctagaaacagaggctcccttgcatgcaagcgacagcagtagcctaggccttagtgtaacggccccactgagcattagcagcgacagcctaggactagacttgcaagcgcccattatttctgaaaatggaaaactgggcctaagagtaacaggtcccctaactgtggccagcagtattgatgctttgacagtagccacaggcagcggtattggacttgatagcaacacgcgcctacaggcaaaattggtcgcgcccctaggctttgacaccaatggcaacattaagctcagcacttcgggcggcatgagactgaacaatggcacacttatactagatgtaaactacccatttgaggctcaaggtcaacttagtctaagagtgggttcgggtccactgtatgtagactccaacacacataacctaaccgctagatgccttagagggctatacataacgtcatctaataaccaaaccggcctggaggccaacataaaacttacaaaaggacttgtgtttgatggaaatgccatagcagttaatgttagcaaagggctagaatacagtaccactgaaacagcgcagggtgtaaatcccatacagactaaaataggtttgggcatggaatatgataccaatggagccataaagccaagactaggctctggtttgagctttgataattcaggagctattgtagtgggaaacaaaaatgatgacactcttactctgtggactacaccagacccatctcccaactgtcagattaactcggaaaaagatgctaaactaaccttggtactaaccaagtgcggtagtcaaattgtaggcacagtatctgcctttgctcttaaaggcagccttgccccaattaatggcacagtgagctcagttagtatattcctaagatttaatgaaaatggggtactgatgagcaactcatcgttggaaagccaatactggaattacaggaatggaaattcaactaatgccacaccatatacaaatgcactaggttttatgcctaacctggcagcttatcccaaaggccaggcaacgactgcaaaaagcagcatcattagccaggtttacatgaatggtgacacttccaaacctatgatatttacaataacttttaatgggcttgaaacagaggaaactcaggtcagtacatattccatgacattttcatggaggtggacaaatggagactacgtggggcactattttaaaacaaactcctttactttctcctacattgcccaagaataaagaaagcacagagatgcttgtttttgatttcaaaattgtgtgcttttatttatttcaagcttacagtatttccagtagtcattcgaatagagcttaattaaactgcatgagaacccttccacatagcttaaattagcaccagtgcaaatggagaaaaatcaacatacctttttatccagatatcagagaactctagtggtcagttttcccccaccctcccagctcacagaatacacagtcctttccccccggctggctttaaacaacactatctcattggtaacagacatattcttaggtgtaataatccacacggtctcttggcgggccaaacgctggtcggtgatgttaataaactccccaggcagctctttcaagttcacgtcgctgtccaactgctgaagcgctcgcggctccgactgcgcctctagcggaggcaacggcaacacccgatccttgatctataaaggagtagagtcataatcccccataagaatagggcggtgatgcagcaacaaggcgcgcagcaactcctgccgccgcctctccgtacggcaggaatgcaacggcgtggtggtctcctccgcgataatccgcaccgctcgcagcatcagcatcctcgtcctccgggcacagcagcgcatcctgatctcactgagatcggcgcagtaagtgcagcacaaaaccaagatgttatttaagatcccacagtgcaaagcgctgtacccaaagctcatggcgggaaggacagcccccacgtgaccatcataccagatcctcaggtaaatcaaatgacgacctctcataaacacgctggacatgtacatcacctccttgggcatgtgctgattcaccacctctcgataccacaagcatcgctgattaattaaagacccctcgagcaccatcctgaaccaggaagccagcacctgaccccccgccaggcactgcagggaccccggtgaatcgcagtggcagtgaagactccagcgctcgtagccgtgaaccatagagctggtcattatatccaaattggcacaacacagacacactttcatacactttttcatgattagcagctcctctctagtcaggaccatatcccaaggaatcacccactcttgaatcaaggtaaatcccacacagcagggcaggcctctcacataactcacgttatgcatagtgagcgtgtcgcaatctggaaataccggatgatcttccatcaccgaagcccgggtctccgtctcaaagggaggtaaacggtccctcgtgtagggacagtggcgggataatcgagatcgtgttgaacgtagagtcatgccaaagggaacagcggacgtactcatatttcctccagcagaaccaagtgcgcgcgtggcagctatccctgcgtcttctgtctcgccgcctgccccgttcggtgtagtagttgtaatacagccactccctgagaccgtcaaggcgctccctggcgtccggatctatgacaacaccgtcctgcagcgccgccctgatgacatccaccaccgtagagtatgccaagcccagccaggaaatgcattcactttgacagcgagagataggaggagcggggagagatggaagaaccatgatagtaaagagaacttttattccaatcgatcttctaagatatcaaagtggagatctataagatgacactggtctcctccgctgagtcgatcaaaaataacagctaaaccacaaacaacacgattggtcaaatgctccacaagggcctgcagcataaaattgcctcggaactccaccgcaagcataacatcaaagccaccgcctctatcgtgatcaagaataaaaaccccacagctatccaccagacccatatagttttcatctctccatcgtgaaaaaagatttacaagctcctcctttaaatcacctccaaccaattgaaaaagttgaaccagaccgccctccaccttcattttcagcaagcgtatcatgattgcaaaaattcaggctcctcagacacctgtataagattgagaagcggaacgttaacatcgatgtttcgctcgcgtaaatcacgcctcagtgcaagcataatataatcccacaggtcggagcggatcagcgaggacacctccccgccaggaaccaactcaacggagcctatgctgattataatacgcatattcggagctatgctaaccagcacggcccccaaataggcgtactgcataggcggcgacaaaaagtgaacagtttgggttaaaaaatcaggcaaacactcgcgcaaaaaagcaagaacatcataaccatgctcatgcaaatagatgcaagtaagctcaggaacgaccacagaaaaatgcacaatttttctctcaaacatgactgcgagccctgcaaaaaataaaaaagaaacattacacaagagtagcctgtcttacgatgggatagactactctaaccaacataagacgggccacaacatcgcccgcgtggccataaaaaaaattgtccgtgtgattaaaaagaagcacagatagctggccagtcatatccggagtcatcacgtgtgaacccgtgtagacccccgggttggacacatcggccaaagaaagaaagcggccaatgtacccaggaggaattataacactaagacgaagatacaacagaataaccccatgagggggaataacaaagttagtaggtgaataaaaacgataaacacccgaaactccctcctgcgtaggcaaaatagcaccctccccttccaaaacaacatatagcgcttccacagcagccatgacaaaagactcaaaacactcaaaagactcagtcttaccaggaaaataaaagcactctcacagcaccagcactaatcagagtgtgaaaagggccaagtgccgaacgagtatatataggaataaaaaatgacgtaaatgtgtaaaggtcagaaaacgcccagaaaaatacacagaccaacgcccgaaacgaaaacccgcgaaaaaatacccagaacttcctcaacaaccgccacttccgctttctcacgatacgtcacttccgcaagaaaagcaaaactacatttcccacatgtgtaaaaacgaaaccccgccccttctaaccgcccacaacttacatcatcaaaacgtaaagtcctacgtcacccgccccgcctctccccgcccacctcattatcatattggccacaatccaaaataaggtatattattgatgatg

SEQ ID NO: 49 - DNA, 37073 bp, Gorilla beringei graueri
catcatcaataatataccttattttggattgtggccaatatgataatgaggtgggcggggagaggcggggcgggtgacgtaggacgcgcgagtagggttgggaggtgtggcggaagtgtggcatttgcaagtgggaggagctcacatgcaagcttccgtcgcggaaaatgtgacgtttttgatgagcgccgcctacctccggaagtgccaattttcgcgcgcttttcaccggatatcgtagtaattttgggcgggaccatgtaagatttggccattttcgcgcgaaaagtgaaacggggaagtgaaaactgaataatagggcgttagtcatagcgcgtaatatttaccgagggccgagggactttgaccgattacgtggaggactcgcccaggtgttttttacgtgaatttccgcgttccgggtcaaagtctccgtttttattgtcaccgtcatttgacgcggagggtatttaaacccgctgcgctcctcaagaggccactcttgagtgccagcgagaagagttttctcctctgctccgcttcggtgatcgaaaaatgagacacatagcctgcactccgggtcttttgtccggtcgggcggcggccgagcttttggacgctttgatcaatgatgtcctgagcgatgattttccgtctactacccactttagcccacctactcttcacgaactgtacgatctggatgtactggtggatgtgaacgatcccaacgaggaggcggtttctgcgttttttcccgagtctgcgctgttggccgctcaggagggatttgacctacacactccgccgcctattttagagtctccgctgccggagcccagtggtataccttatatgcctgaactgcttcccgaagtggtagacctgacctgccacgagcctggctttccgcccagcgacgatgatggtgagccttttgttttagactttgctgagatacctgggcacggttgcaggtcttgtgcatatcatcagagggttaccggagaccccgaggttaagtgttcgctgtgctatatgaggatgacctcttcctttatctacagtaagtttttgtctaggtgggcttttgggtaggtgggttttgtgtcagaacaggtgtaaacgttgcttgtgttttttgtacctgtaggtccggtgtccgagccagacccggagcccgaccgcgatcccgagccggatcccgagcctcctcgcaggacaaggaaactaccttccattctgtgcaagtctcagacacctgtaaggaccagcgaggcagacagcaccgactctggcacttctacctctccccctgaaattcacccagtggttcctctgggtatacataaacctgttgctgttagagtttgcgggcgacgccctgcagtacagtgcattgaggacttgcttcacgatcccgaggaacctttggacttgagccttaaacgccctaggcaataaaccccacctaagtaataaaccccacctaagtaataaaccctgccgcccttggttattgagatgacgcccaatgtttgcttttgaatgacttcatgtgtgtaataaaagtgagtgtgatcataggtctcttgtttgtctgggcggggcttaagggtatataagtttctcggggctaaacttggttacacttgaccccaatggaggcgtgggggtgcttggaggagtttgcggacgtgcgccgtttgctggacgagagctctaaccatacctatactatttggaggtatctgtggggctctactcaggccaagttggtctccagaattaagcaggattacaagtgcgattttgaagagctttttagttcctgcggtgagcttttgcaatccttgaatctgggccatcaggctattttccaggaaaaggttctctcgactttggatttttccactcccgggcgcaccgccgcttgtgtggcttttgtgtcttttgtgcaagataaatggagcgaggagacccacctgagtcacggctacgtactggatttcatggcgatggctctttggagggctcacaacaaatggaagattcagaaggaactgtacggttccgccctacgtcgtccacttttgtcgcgacaggggctgaggtttcccgaccatcggcagcatcagaatctggaagacgagtcggaggagcgagcggaggagaagatcagcttgagagccggcctggaccctcctcaggaggaatgaatctcccgcaggtggttgacctgtttccagaactgagacgggtcctgactatcagggaggatggtcagtttgtgaagaagtttaagagggatcggggtgagggagatgatgaggcggctagcaatttagcttttagtctgatgactcgccaccgaccggaatgtattacctatcagcagattaaggagagttgtgccaacgagctggatcttttgggtcagaagtatagcatagaacagcttaccacttactggcttcagcctggggatgattgggaagaggcgatcagggtgtatgcaaaggtggccctgcggcccgattgcaagtataagattactaagttggttaatattagaaactgctgctatatttctgggaacggggccgaagtggagatagatactcaggacagggtggcttttaggtgttgcatgataaacatgtggcccgggatactggggatggatggggtggtgttcatgaatgtgaggtttacgggccccaactttaatggcacggtgttcatgggcaacaccaacttgctcctgcatggtgcgagtttctatgggtttaataacacctgtatagaggcctggaccgatgtaaaggttcgaggttgttccttttatagctgttggaaggcggtggtgtgtcgccctaaaagcaggggttctgtgaaaaaatgcttgtttgaaaggtgcaccttaggcatcctctctgagggcaactccagggtgcgccataatgtggcttcgaactgcggttgcttcatgcaagtgaagggggtgagcgttatcaagcataactcggtgtgtggaaactgcgaggatcgcgcctcccagatgctgacctgctttgatggtaactgtcacctgttgaagaccattcatataagcagccaccccagaaaggcctggcccgtgtttgagcataacatcctgacccgctgctccttgcatctgggggtcaggaggggtatgttcctgccttaccagtgtaactttagccacactaaaatcctgctggaacccgagtgtatgaccaaggtcagcctaaatggcgtgtttgatgcgactctgagaatctggaaggtgctgaggtatgatgagaccaggaccaggtgccgaccctgcgagtgcggcggcaagcacatgagaaatcagcctgtgatgttggatgtgaccgaggagcttaggcctgaccatctggtgctggcctgcaccagggccgagtttgggtctagcgatgaggataccgattgaggtgggtaaggtgggcgtggctagaagggtggggcgtgtataaattgggggtctaagggtctctctgttttgtcttgcaacagccgccgccatgagcgacaccggcaacagctttgatggaagcatctttagcccctatctgacagtgcgcatgcctcactgggctggagtgcgtcagaatgtgatgggttccaacgtggatggacgccccgttctgccttcaaattcgtctacaatggcctacgcgaccgtgggaggaactccgctggacgccgcgacctccgccgccgcctccgccgccgccgcgaccgcgcgcagcatggctacggacctttacagctctttggtggcgagcagcgcggcctctcgcgcgtctgctcgggatgagaaactgaccgctctgctgcttaaactggaagacttgacccgggagctgggtcaactgacccagcaggtctccagcttgcgtgagagcagccttgcctccccctaatggcccataatataaataaaagccagtctgtttggattaagcaagtgtatgttctttatttaactctccgcgcgcggtaagcccgggaccagcggtctcggtcgtttagggtgcggtggattctttccaacacgtggtacaggtggctctggatgtttagatacatgggcatgagtccatccctggggtggaggtagcaccactgcagagcttcgtgctcgggggtggtgttgtatatgatccagtcgtagcaggagcgctgggcgtggtgctgaaaaatgtccttaagcaagaggcttatagctagggggaggcccttggtgtaagtgtttacaaatctgctcagttgggaggggtgcatccggggggatataatgtgcatcttggactggatttttaggttggctatgttcccacccagatcccttctgggattcatgttgtgcaggaccaccagcacggtatatccagtgcacttgggaaatttatcgtggagcttagacgggaatgcatggaagaacttggagacgcccttgtggcctcccagattttccatacattcgtccatgatgatggcaatgggcccgtgggaagctgcctgagcaaaaatgtttctgggatcgctcacatcgtagttatgttccagggtgaggtcatcataagacatctttacaaatcgggggcggagggtcccggactggggtatgatggtaccctcgggccccggggcgtagttcccctcacagatctgcatctcccaggctttcatttcagagggagggatcatatccacctgcggagcgatgaaaaacacagtttctggcgcaggggagattaactgggatgagagcaggtttctgagcagctgtgactttccacagccggtgggcccatatatcacgcctatcaccggctgcagctggtagttaagagagctgcagctgccgtcctcccggagcaggggggccacctcgttcagcatatccctgacgtggatgttctccctgaccaattccgccagaaggcgctcgccgcccagcgaaagcagctcttgcaaggaagcaaaatttttcagcggttttaggccgtcggccgtgggcatgtttttcagcgtctgggtcagcagttccagcctgtcccacagctcggtgatgtgctctacggcatctcgatccagcagatctcctcgtttcgcgggttggggcggctttcgctgtagggcaccagccgatgggcgtccagcggggccagagtcatgtccttccatgggcgcagggtcctcgtcagggtggtctgggtcacggtgaaggggtgcgctccgggttgggcgctggccagggtgcgcttgaggctggttctgctggtgctgaatcgctgccgctcttcgccctgcgcgtcggccaggtagcatttgaccatggtctcgtagtcgagaccctcggcggcgtgccccttggcgcggagctttcccttggaggtggcgccgcacgaggggcactgcaggctcttcagggcgtagagcttgggagcgagaaacacggactctggggagtaggcgtccgcgccgcaggaagcgcagaccgtctcgcattccaccagccaagtgagctccgggcggtcagggtcaaaaaccaggttgcccccatgctttttgatgcgtttcttacctcggctctccatgaggcggtgtcccttctcggtgacgaagaggctgtccgtgtccccgtagaccgacttcaggggcctgtcttccagcggagtgcctctgtcctcctcgtagagaaactctgaccactctgagacgaaggcccgcgtccaggccaggacgaaggaggccacgtgggaggggtagcggtcgttgtccactagcgggtccaccttctccagggtgtgcaggcacatgtccccctcctccgcgtccagaaaagtgattggcttgtaggtgtaggacacgtgaccgggggttcccgacgggggggtataaaagggggtgggcgccctttcatcttcactctcttccgcatcgctgtctgcgagagccagctgctggggtaagtattccctctcgaaggcgggcatgacctcagcgctcaggttgtcagtttctaaaaatgaggaggatttgatgttcacctgtcctgaggtgatacctttgagggtacctgggtccatctggtcagaaaacactatttttttgttgtcaagcttggtggcgaacgacccgtagagggcgttggagagcagcttggcgatggagcgcagggtctggtttttgtcgcggtcggctcgctccttggccgcgatgttgagttgcacgtactcgcgggccacgcacttccactcggggaagacggtggtgcgctcgtctgggatcaggcgcaccctccagcctcggttgtgcagggtgaccatgtcgacgctggtggcgacctcgccgcgcaggcgctcgttggtccagcagaggcggccgcccttgcgcgagcagaaggggggtagggggtccagctggtcctcgtttggggggtccgcgtcgatggtgaagaccccggggagcaagcgcgggtcaaagtagtcgatcttgcaagcttgcatgtccagagcccgctgccattcgcgggcggcgagcgcgcgctcgtaggggttgaggggcgggccccagggcatggggtgggtgagcgcggaggcgtacatgccgcagatgtcatacacgtacaggggttccctgaggatgccgaggtaggtggggtagcagcgccccccgcggatgctggcgcgcacgtagtcatagagctcgtgggagggggccagcatgttgggcccgaggttggtgcgctgggggcgctcggcgcggaaggcgatctgcctgaagatggcatgggagttggaggagatggtgggccgctggaagacgttgaagcttgcttcttgcaagcccaccgagtccctgacgaaggaggcgtaggactcgcgcagcttgtgcaccagctcggcggtgacctggacgtcgagcgcgcagtagtcgagggtctcgcggatgatgtcatacttatcctcccccttctttttccacagctcgcggttgaggacgaactcttcgcggtctttccagtactcttggaggggaaacccgtccgtgtccgaacggtaagagcctagcatgtagaactggttgacggcctggtaggggcaacagcccttctccacgggcagcgcgtaggcctgcgccgccttgcggagggaggtgtgggtgagggcgaaagtgtccctgaccatgactttgaggtattgatgtttgaagtctgtgtcatcgcagccgccctgttcccacagggtgtagtccgtgcgctttttggagcgcgggttgggcagggagaaggtgaggtcattgaagaggatcttccccgctcgaggcatgaagtttctggtgatgcgaaagggccctgggaccgaggagcggttgttgatgacctgggcggccaggacgatctcgtcaaagccgtttatgttgtggcccacgatgtagagctccaaaaagcggggctggcccttgatggaggggagctttttgagttcctcgtaggtgagctcctcgggcgattccaggccgtgctcctccagggcccagtcttgcaagtgagggttggccgccaggaaggatcgccagaggtcgcgggccatgagggtctgcaggcggtcgcggaaggttctgaactgtcgccccacggccatcttttcgggggtgatgcagtagaaggtgagggggtctttctcccaggggtcccatctgagctctcgggcgaggtcgcgcgcggcggcgaccagagcctcgtcgccccccagtttcatgaccagcatgaagggcacgagctgcttgccaaaggctcccatccaagtgtaggtctctacatcgtaggtgacaaagaggcgctccgtgcgaggatgagagccgatcgggaagaactggatctcccgccaccagttggaggattggctgttgatgtggtgaaagtagaagtcccgtctgcgggccgagcactcgtgctggcttttgtaaaagcgaccgcagtactggcagcgctgcacgggttgtatatcttgcacgaggtgaacctggcgacctctgacgaggaagcgcagcgggaatctaagtcccccgcctggggtcccgtgtggctggtggtcttctactttggttgtctggccgccagcatctgtctcctggagggcgatggtggagcagaccaccacgccgcgagagccgcaggtccagatctcggcgctcggcgggcggagtttgatgacgacatcgcgcacattggagctgtccatggtctccagctcccgcggcggcaggtcagctgggagttcctggaggttcacctcgcagagacgggtcaaggcgcgggcagtgttgagatggtatctgatttcaaggggcgtgttggcggcggagtcgatggcttgcaggaggccgcagccccggggggccacgatggttccccgcggggcgcgaggggaggcggaagctgggggtgtgttcagaagcggtgacgcgggcgggcccccggaggtagggggggttccggccccacgggcatgggcggcaggggcacgtcttcgccgcgcgcgggcaggggctggtgctggctccgaagagcgcttgcgtgcgcgacgacgcgacggttggtgtcctgtatctggcgcctctgagtgaagaccacgggtcccgtgaccttgaacctgaaagagagttcgacagaatcaatctcggcatcgttgacagcggcctggcgcaggatctcctgcacgtcgcccgagttgtcctggtaggcgatctctgccatgaactgctcgatctcttcctcctggagatctcctcgtccggcgcgctccacggtggccgccaggtcgttggagatgcgacccatgagctgcgagaaggcgttgagcccgccctcgttccagacccggctgtagaccacgcccccctcggcgtcgcgggcgcgcatgaccacctgggccaggttgagctccacgtgtcgcgtgaagacggcgtagttgcgcaggcgctggaaaaggtagttcagggtggtggcggtgtgctcggcgacgaagaagtacatgacccagcgccgcaacgtggattcattgatgtcccccaaggcctccaggcgctccatggcctcgtagaagtccacggcgaagttgaaaaactgggagttgcgagcggacacggtcaactcctcctccagaagacggatgagctcggcgacagtgtcgcgcacctcgcgctcgaaggccacggggggcgcttcttcctcttccacctcttcttccatgatcgcttcttcttcttcctcagccgggacgggagggggcggcggcggcgggggaggggcgcggcggcggcggcggcgcaccgggaggcggtcgatgaagcgctcgatcatctccccccgcatgcggcgcatggtctcggtgacggcgcggccgttctcccgggggcgcagctcgaagacgccgcctctcatctcgccgcggggcgggcggccgtgaggtagcgagacggcgctgactatgcatcttaacaattgctgtgtaggtacgccgccgagggacctgattgagtccagatccaccggatccgaaaacctttggaggaaagcgtctatccagtcgcagtcgcaaggtaggctgagcaccgtggcgggcgggggcgggtctggagagttcctggcggagatgctgctgatgatgtaattaaagtaggcggtcttgagaaggcggatggtggacaggagcaccatgtctttgggtccggcctgttggatgcggaggcggtcggccatgccccaggcctcgttctgacaccggcgcaggtctttgtagtagtcttgcatgagtctttccaccggcacctcttctccttcctcttctccatctcgccggtggtttctcgcgccgcccatgcgcgtgaccccaaagcccctgagcggctgcagcagggccaggtcggcgaccacgcgctcggccaagatggcctgctgcacctgagtgagggtcctctcgaagtcatccatgtccacgaagcggtggtaggcgcccgtgttgatggtgtaggtgcagttggccatgacggaccagttgacggtctggtgtcccggctgcgagagctccgtgtaccgcaggcgcgagaaggcgcgggaatcgaacacgtagtcgttgcaagtccgcaccagatactggtagcccaccaggaagtgcggcggaggttggcgatagaggggccagcgctgggtggcgggggcgccgggcgccaggtcttccagcataaggcggtggtatccgtagatgtacctggacatccaggtgatgccggcggcggtggtggtggcgcgcgcgtagtcgcggacccggttccagatgtttcgcaggggcaagaagtgttccatggtcggcacgctctggccggtgaggcgcgcgcagtcgttgacgctctatacacacacaaaaacgaaagcgtttacagggctttcgttctgtagcctggaggaaagtaaatgggttgggttgcggtgtgccccggttcgagaccaagctgagctcggccggctgaagccgcagctaacgtggtattggcagtcccgtctcgacccaggccctgtatcctccaggatacggtcgagagcccttttgctttcttggccaagcgcccgtggcgcgatctgggatagatggtcgcgatgagaggacaaaagcggctcgcttccgtagtctggagaaacaatcgccagggttgcgttgcggcgtaccccggttcgagcccctatggcggcttggatcggccggaaccgcggctaacgagggccgtggcagccccgtcctcaggaccccgccagccgacttctccagttacgggagcgagccccttttgtttttttattttttagatgcatcccgtgctgcggcagatgcgcccctcgccccggcccgatcagcagcagcaacagcaggcatgcagacccccctctcccctttccgccccggtcaccacggccgcggcggccgtgtcgggcgcggggggcgcgctggagtcagatgagccaccgcggcggcgacctaggcagtatctggacttggaagagggcgagggactggcgcggctgggggcgaactctccagagcgccacccgcgggtgcagttgaaaagggacgcgcgcgaggcgtacctgccgcggcagaacctgtttcgcgaccgcgggggcgaggagcccgaggagatgcgagactgcaggttccaagcggggcgcgagctgcggcgcgggctggacagacagcgcctgctgcgcgaggaggactttgagcccgacacgcagacgggcatcagccccgcgcgcgcgcacgtagccgcggccgacctggtgaccgcctacgagcagacggtgaaccaggagcgcaacttccaaaagagcttcaacaaccacgtgcgcacgctggtggcgcgcgaggaggtgaccctgggtctcatgcatctgtgggacctggtggaggcgatcgtgcagaaccccagcagcaagcccctgaccgcgcagctgttcctggtggtgcagcacagcagggacaacgaggccttcagggaggcgctgctgaacatcaccgagccggaggggcgctggctcctggacctgataaacatcctgcagagcatagtggtgcaggagcgcagcctgagcctggccgagaaggtggcggccatcaactactctatgctgagcctgggcaagttctacgcccgcaagatctacaagaccccctacgtgcccatagacaaggaggtgaagatagacagcttctacatgcgcatggcgctgaaggtgctgaccctgagcgacgacctgggagtgtaccgcaacgagcgcatccacaaggccgtgagcgccagccggcggcgcgagctgagcgaccgcgagctgatgcacagtctgcagcgcgcgctgaccggcgcgggcgagggcgacagggaggtcgagtcctacttcgacatgggggccgacctgcactggcagccgagccgccgcgccctggaggcggcgggggcgtacggcggccccctggcggacgatgaccaggaagaggaggactatgagctagaggagggcgagtacctggaggactgacctggctggtggtgttttggtatagatgcaagatccgaacgtggcggacccggcggtccgggcggcgctgcagagccagccgtccggcattaactcctctgacgactgggccgcggccatgagtcgcatcatggccctgaccgcgcgcaaccccgaggctttcaggcagcagcctcaggccaaccggctggcggccatcttggaagcggtagtgcccgcgcgctccaaccccacccacgagaaggtgctggccatagtcaacgcgctggcggagagcagggccatccgcgcggacgaggccggactggtgtacgatgcgctgctgcagcgggtggcgcggtacaacagcggcaacgtgcagaccaacctggaccgcctggtgacggatgtgcgcgaggccgtggcgcagcgcgagcgcttgcatcaggacggtaacctgggctcgctggtggcgctaaacgccttcctcagcacccagccggccaacgtaccgcgggggcaggaggactacaccaactttttgagcgcgctgcggctgatggtgaccgaggtccctcagagcgaggtgtaccagtcggggcccgactacttcttccagaccagcagacagggcttgcaaaccgtgaacctgagccaggctttgaagaacctgcgggggctgtggggagtgaaggcgcccaccggcgaccgggctacggtgtccagcctgctaacccccaactcgcgcctgctgctgctgctgatcgcgcccttcacggacagcgggagcgtctcgcgggaaacctatctgggccacctgctgacgctgtaccgcgaggccatcgggcaggcgcaggtggacgagcacaccttccaagagatcaccagcgtgagccacgcgctggggcaggaggacacgggcagcctgcaggcgaccctgaactacctgctgaccaacaggcggcagaagattcccacgctgcacagcctgacgcaggaggaggagcgcatcttgcgctacgtgcagcagagcgtgagcctgaacctgatgcgcgacggcgtgacgcccagcgtggcgctggacatgaccgcgcgcaacatggaaccgggcatgtacgcctcccaccggccgttcattaaccgcctgatggactacttgcatcgggcggcggccgtgaaccccgagtacttcactaatgccattctgaatccccactggatgccccctccgggtttctacaacggggacttcgaggtgcccgaggttaacgacgggttcctctgggatgacatggatgacagtgtgttctcacccaacccgctgcgcgccgcgtctctgcgattgaaggagggttctgacagggaaggaccgaggagtctggcctcctccctggctctgggagcggtgggcgcggcggcgcggggcagtagccccttccccagcctggcagactctctgaacagcgggcgggtgagcaggccccgcttgctaggcgaggaggagtatctgaacaactccctgctgcagcccgcgagggacaaaaacgctcagcggcagcagtttcccaacaatgggatagagagcctggtggacaagatgtccagatggaagacgtatgcgcaggagtacaaggagtgggaggaccgccagccgcggcccctgccgccccctaggcagcgctggcagcggcgcgcgtccaaccgccgctggaggcaggggcccgaggacgatgatgactctgcagatgacagcagcgtgctggacctgggcgggagcgggaaccccttttcgcacctgcgcccccgcctgggcaagatgttttaaaagagaaaaaataaaaactcaccaaggccatggcgacgagcgttggttttttgttcccttccttagtatgcgacgcgcggcgatgttcgaggaggggcctcccccctcttacgagagcgcgatgggattttctcctgcgacgcccctacagcctccctacgtgcctcctcggtacctgcaacctaccgggggaagaaatagcatctgttactctgagctgcagcccctgtatgacaccaccaaagtgtacctggtggacaacaagtctgcggacgtggcctccctgaactaccagaacgaccacagcgattttttgaccaccgtgatccaaaacaatgacttcaccccaaacgaggccagcacccagaccataaacctggacaacaggtcgcactggggcggtgatctgaagaccatcttgcacaccaacatgcccaacgtgaatgagtttatgtttactaactcttttaaggcgcgggtaatggtggcgcgcgacgataagggagtgcctaaatacgagtgggtggactttacactgcccgagggcaactactccgagatcatgactcttgacctgatgaacaacgcgatcgtggagcactacttgaaagtaggcaggcagaacggggtaaaagaaagcgatattggagttaagtttgacaccaggaactttcgcctgggatgggaccccgagacggggttggttatgcccggggtttacactaatgaagcttttcaccccgatatagtgctcttgcccggatgcggggtggacttcacccaaagccggctgagcaacctgctgggcattcgaaagcgccagccattccaggaggggtttcaaatcacttatgagcatttggaagggggcaacattccggcgcttctggatttggtcgcctacgaggagagtttgaaatccgaggaaagcggggataacactgacaagggcggcgaggagcaagccggcgatggcgacactgcttcggtagaaaacgaaagtgcgtccgtggtggaggcggcggcggtagcgaccgcagagccggagaccgtagaggaggatatgaatgatagcgcaatcagaggagactcgtttattccccggggcgaagaaaagaaggcggaggctgcggcagcagtcgaagcagagcccaaagtcgagtcggagatcatggaggaggatttgaatgataacgcgatcagaggtgatacgtttgtgccgcggggcgaagaaaaaaaagcggaggcggaggccgcggctgaggaggcggccgaggctgtggcagccaccgcggcggtgactgaaacaactgaggagcaggttcaggccgagcaggttcaaaagaagcccgtgattaaagccctaacacaagatagcaaggagcgcagttacaacttgattcccggtagtactgacaccgagtaccgcagctggtacctggcatacaactacggcgacccggtcaaaggggtgcgctcgtggactctgctttgcacgccggacgtcacctgcggctccgagcagatgtactggtcgttgccaaacatgatgcaagacccggtgaccttccgctccacgcggcaggttaacaacttcccggtggtgggcgccgaactgctgcccgtgcactccaagagcttttacaacgagcaggccgtgtactcccagctgatccgccaggccacctctctgacccacgtgttcaatcgctttcccgagaaccagattttggcgcgcccgccggcccccaccatcactaccgtcagtgaaaacgttcctgctctcacagatcacgggacgctaccgctgcgcaacagcatctcaggagtccagcgagtgaccattactgacgccagacgccggacctgcccctacgtttacaaggccttgggcatagtctcgccgcgcgtcctctccagccgcactttttaaaacacatattcacccacgcttcaaagattatgtctatacttatctcacccagcaataacaccggctgggggctgcgcgcgcccagcaagatgtttggaggggcgagaaaacgttccgagcagcacccagtgcgcgtgcgcggccactaccgcgcgccctggggagcgcacaagcgcgggcgcgcagggcgcaccactgtggacgacgccattgactccgtagtggagcaggcgcgccactacacacccggcgcgccgtccgcccccgccgtgtccaccgtggacgaggcgatcgaaagcgtggtacagggcgcgcggcactatgccaaccttaaaaatcgccgccgtcgcgtggcccgccgccatcgccggagaccccgggccaccgccgccgcgcgccttgctaaggctctactcaggcgcgccaggcgaactggccgccgggccgccatgagggccgcacggcgggctgccgccagtgcggccgccgcggccccacgggcacgaaggcgcgcggccgctgccgccgccgccgccatttccagcttggcctcaacgcggcgcggtaacatatactgggtgcgcgactcgataaccggcacgcgggtacccgtgcgctttcgccccccgcggaattagcacaagacaacatacacactgagtctcctgctgttgtgtatcccagcggcgaccgtcagcagcggcgacatgtccaagcgcaaaattaaagaagagatgctccaggtcatcgcgccggagatctatgggcccccgaagaaggaggaggatgattacaagccccgcaagctaaagcgggtcaaaaagaaaaagaaagatgatgatgatgacgaggcggtggagtttgtccgccgcatggcacccaggcgccccgtgcagtggaagggtcggcgcgtgcagcgcgttttgcgccccggcaccgcggtggtcttcacgcccggcgagcgctccacgcgcactttcaagcgggtgtacgatgaggtgtacggcgacgaggacctgttggagcaggccaaccagcgctttggggagtttgcatatgggaaacggccccgcgagagtctaaaagaggacctgctggcgctaccgctggacgagggcaatcccaccccgagtctgaagccggtgaccctgcaacaggtgctgcctttgagcgcgcccagcgagcataagcgagggttgaagcgcgagggcggggacctggcgcccaccgtgcagttgatggtgcccaagcggcagaagctggaggacgtgctggagaaaatgaaagtagagcccgggatccagcccgagatcaaggtccgccccatcaagcaggtggcgcccggcgtgggagtccagaccgtggacgttaggattcccacggaggagatggaaacccaaaccgccactccctcttcagcggccagcgccaccaccggcaccgcttcggtagaggtgcagacggacccctggctacccgccgccgctgtcgccgccgccgccgccccccgttctcgcgggcgcaagagaaattatccagtggccagcgcgctcatgccccagtacgcactgcatccatccatcgcgcccacccccggctaccgcgggtattcgtaccgcccgcgcagatcggccggcactcgcggccgccgccgccgtgcgaccacaaccagccgccgccgtcgccgccgccgccagccagtgctgacccccgtgtctgtaaggaaggtggctcgctcggggagcacgctggtggtgcccagagcgcgctaccaccccagcatcgtttaaagccggtctctgtatggttcttgcagatatggccctcacttgtcgcctccgcttcccggtgccgggataccgaggaagaactcaccgccgcagaggcatggcgggcagcggtctccgcggcggccgtcgccatcgccggcgcgcaaaaagcaggcgcatgcgcggcggtgtgctgcctctgctaatcccgctaatcgccgcggcgatcggtgccgtacccgggatcgcctccgtggccctgcaggcgtcccagaaacgttgactcttgcaaccttgcaagcttgcatttttttggaggaaaaataaaaaagtctagactctcacgctcgcttggtcctgtgactattttgtagaaaaaagatggaagacatcaactttgcgtcgctggccccgcgtcatggctcgcgcccgttcatgggagactggacagatatcggcaccagcagtatgagcggtggcgccttcagctggggcagtctgtggagcggccttaaaaattttggttccaccattaaaaactatggcaacaaagcgtggaacagcagcacgggccagatgctaagagacaagttgaaagagcagaacttccaggagaaggtggcgcagggcctggcctctggcatcagcggggtggtggacatagctaaccaggccgtgcagaaaaagataaacagtcatctggacccccgccctcaggtggaggaaacgcctccagccatggagacggtgtttcccgagggcaaaggcgaaaagcgcccgcggcccgacagggaagagaccctggtgtcacacaccgaggagccgccctcttacgaggaggcactcaaggccggcctgcccaccactcgccccgtagctcccatggccacaggtgtggtgggccataaacaacacacccccgcaacactagatctgcccccgccgtccgagccgccgcgtcagccaaagacggcgacggtgcccgctccctccacttccgccgccaacagagtgtccctgcgccgcactacgggcgcccctcggggaccgcgactgagcggcaactggcagagcacactgaacagcattgtgggcctgggagtgaaaagtgtgaagcgccgccgttgctactgaatgagcaagctagctaacgtgttatatgtgtgtatgcgtcctatgtcgccgccagaggagctgttgagccgcccgcgccgtctgcactccagcgaatttcaagatggcgaccccttcgatgatgccacagtggtcgtacatgcacatctcgggccaggacgcctcggagtacctgagccccgggctggtgcagttcgcccgcgccaccgacagctacttcagcctaagtaacaaatttaggaaccctacggtggcacccacccacgatgtgaccacggaccggtcgcagcgcctgacgctgcggtttatccccgtggatcgggaggacactgcctactcttacaaggcgcgcttcacgctagccgtgggcgacaaccgcgtgctggacatggcctccacctactttgatatccggggtgtgctggacaggggtcccacctttaagccctactcgggcactgcctacaactccctggctcctaaaggcgctcccaattcttgcgagtgggatgaaaaaactaatactgctgaagcagccattgaaaatgaagaagagctggcggatgagccagaagagcaagcagaagaggctataaaaaccaatgtgtttgcccaggcgccatattctggcaatgcaatttccaaagaaggaatacaagtaggcatagaaggcattggagagcaagtaaaagccgtatacgcagacaaaacctaccagccggaacctcaggttggagaaactcaatggaatgagactgaaataaatcatggagcaggaagggtgctgaagaagaccactcccatgaagccttgctatggttcttatgctaaacctactaatgaatatggaggccagggcatccttgtagaaaaaaatggcaaaatggaaagccaggtggaaacacagttttttgctcttgacggtgaaaatgataatagtccaaaagtggtgttgtatagcgaagatgtaaacttggatactcctgacacacacctatcatacaaacctagcgcccaagatgtaaactctaaagaaatgttgggccaacaggccatgcccaacaggccaaatcttattgcttttagggacaactttattggacttatgtactacaacagcactggcaacatgggagtgctggcaggacaggcctcccaactaaatgccgtggtagacttgcaagacagaaacacagagttgtcataccagctgatgcttgattccattggagacagatcaagatattttgccatgtggaaccaggcggttgatagttacgatccagatgttagaattattgaaaaccatggcacagaggatgaacttccaaactactgttttcctttgggaggaatatttaatactcagagttttaaaaaggtaaaacctggaacggataacggatgggaaacagatgatgacttttcagataaaaatgaaataagagttggcaacaactttgccatggagatcaatatccaggcaaacctgtggagaagcttcttgtattccaatgtggctctctacctgccagataagatgaagtactctccaaccaacatagacatttccaccaacactaacacctatgactacatgaacaaaagagtggcgcctccaggcctggtggactgctatgtcaatctgggggccaggtggtcccttgatgtaatggataacatgaacccctttaaccaccaccgcaatgcgggcctgcgataccgttccatgcttctgggtaacggccgctacgtgcccttccacatccaggtgccccaaaagttctttgccatcaaaagccttctactcttgcctggctcgtacacctacgaatggaatttcagaaaggatgtgaacatggtcctacagagctctctgggcaacgaccttagggtggatggggccagcatcaagtttgacagcatcaccctttatgctacctttttccccatggcccacaacaccgcttccacgcttgaggccatgctcagaaacgacaccaacgaccagtccttcaatgactacctctctggggccaacatgctctaccccatccccgccaacgctaccaacgtgcccatctccattccctctcgcaactgggccgccttcagaggctgggcatttacccgccttaagaccaaggagaccccctccctgggctcgggttttgacccctactttgtctactcgggatccatcccctacctggatggcaccttctacctcaaccacacttttaagaagatatccatcatgtatgactcctctgtcagctggccgggcaacgaccgcctgctcacccccaatgagttcgaggtcaagcgcgccgtggacggcgagggctacaacgtggcccagtgcaacatgaccaaggactggttcctggtgcagatgctggccaactacaacataggctaccagggcttctacatcccagagagctacaaggacaggatgtactccttcttcagaaatttccaacccatgagcaggcaggtggtggacgagaccaaatacaaggactatcaggccgttggcatcactcaccagcacaacaactcgggattcgtgggctacctggcacccaccatgcgcgagggacaggcctaccccgccaacttcccctaccccttgataggcaagaccgcggtcgacagcgtcacccagaaaaagttcctctgcgaccgcaccctctggcgcatccccttttctagcaacttcatgtccatgggcgcgctcacggacctgggccagaacctgctctatgccaactccgcccatgcgctggacatgacttttgaggtggaccccatggacgagcccacccttctctatattgtgtttgaagtgttcgacgtggtcagagtgcaccagccgcaccgcggtgtcatcgagaccgtgtacctgcgcacgcccttctcggccggcaacgccaccacctaaggagacagcgccgccgcctgcatgacgggttccaccgagcaagagctcagggccatcgccagagacctgggatgcggaccctattttttgggcacctatgacaaacgcttcccgggcttcatctcccgagacaagctcgcctgcgccatcgtcaacacggccgcgcgcgagaccgggggcgtgcactggctggcctttggctgggacccgcgctccaaaacttgctacctctttgacccttttggcttctccgatcagcgcctcaagcagatctatgagtttgagtacgaggggctgctgcgccgcagcgcgcttgcctcctcgcccgaccgctgcatcacccttgagaagtccaccgagaccgtgcaggggccccactcggccgcctgcggtctcttctgctgcatgtttttgcacgcctttgtgcgctggccccagagtcccatggatcgcaaccccaccatgaacttgctcaagggagtgcccaacgccatgctccagagcccccaggtccagcccaccctgcgccacaaccaggaacagctctaccgcttcctggagcgccactccccctacttccgcagtcacagcgcgcgcatccggggggccacctctttctgccacttgcaagaaaacatgcaagacggaaaatgatgtacagctcgctttttaataaatgtaaagactgtgcactttatttatacacgggctctttctggttatttattcaacaccgccgtcgccatctagaaatcgaaagggttctgccgcgcgtcgccgtgcgccacgggcagagacacgttgcgatactggaagcggctcgcccacttgaactcgggcaccaccatgcggggcagtggttcctcggggaagttctcgccccacagggtgcgggtcagctgcagcgcgctcaggaggtcgggagccgagatcttgaagtcgcagttggggccggaaccctgcgcgcgcgagttgcggtacacggggttgcagcactggaacaccagcagggccggattatgcacgctggccagcaggctctcgtcgctgatcatgtcgctgtccagatcctccgcgttgctcagggcgaatggggtcatcttgcagacctgcctgcccaggaaaggcggcagcccgggcttgccgttgcagtcgcagcgcaggggcatcagcaggtgcccgcggcccgactgcgcctgcgggtacagcgcgcgcatgaaggcttcgatctgcctgaaagccacctgcgccttggctccctccgaaaagaacatcccacaggacttgctggagaactggttcgcgggacagctggcatcgtgcaggcagcagcgcgcgtcggtgttggcgatctgcaccacgttgcgaccccaccggttcttcactatcttggccttggaagcctgctccttcagcgcgcgctggccgttctcgctggtcacatccatctctatcacctgctccttgttgatcatgtttgtcccgtgcagacacttcaggtcgccctccgtctgggtgcagcggtgctcccacagcgcgcaaccggtgggctcccaattcttgtgggtcacccccgcgtaggcctgcaggtaggcctgcaagaagcgccccatcatggccacgaaggtcttctggctcgtaaaggtcagctgcaggccgcgatgctcttcgttcagccaggtcttgcagatggcggccagcgcctcggtctgctcgggcagcatcctaaaatttgtcttcaggtcgttatccacgtggtacttgtccatcatggcgcgcgccgcctccatgcccttctcccaggcggacaccatgggcaggcttagggggtttatcacttccaccggcgaggacaccgtactttcgatttcttcttcctccccctcttcccggcgcgcgcccacgctgctgcgcgctctcaccgcctgcaccaaggggtcgtcttcaggcaagcgccgcaccgagcgcttgccgcccttgacctgcttaatcagcaccggcgggttgctgaagcccaccatggtcagcgccgcctgctcttcttcgtcttcgctgtctaccactatctctggggaagggcttctccgctctgcggcggtgcgcttcttttttttcttgggagcagccgtgacggagtccgccacggcgacggaggtcgagggcgtggggctgggggtgcgcggtaccagggcctcgtcgccctcggactcttcctctgactccaggcggcggcggagtcgcttctttgggggcgcgcgcgtcagcggcggcggagacggggacggggacggggacgggacgccctccacagggggtggtcttcgcgcagacccgcggccgcgctcgggggtcctctcgagctggtcttggtctcgactggccattgtatcctcctcctcctaggcagagagacataaggagtctatcatgcaagtcgagaaggaggagagcttaaccaccccctctgacaccgccgatgcgcccgccgtcgccgtcgcccccgctgccgccgacgcgcccgccacaccgagcgacacccccgcggacccccccgccgacgcacccctgttcgaggaagcggccgtggagcaggacccgggctttgtctcggcagaggaggatttgcgagaggaggagaataaggagaagaagccctcagtgccaaaagatgataaagagcaagacgagcacgacgcagatgcacaccagggtgaagtcgggcggggggacggagggcatggcggcgccgactacctagacgaagggaacgacgtgctcttgaagcacctgcatcgtcagtgcgccatcgtttgcgacgctctgcaggagcgcagcgaagtgcccctcagcgtggcggaggtcagccacgcctacgagctcagcctcttctccccccgggtgcccccccgccgccgcgaaaacggcacatgcgagcccaacccgcgcctcaacttctaccccgccttcgtggtgcccgaggtcctggccacctatcacatcttctttcaaaattgcaagatccccctctcgtgccgcgccaaccgtagccgcgccgataagatgctggccctgcgccagggcgaccacatacctgatatcgccgctttggaagatgtgccaaagatctttgagggtctgggtcgcaacgagaagcgggcagcaaactctctgcaacaggaaaacagcgaaaatgagagtcacaccggggtactggtggagctcgagggcgacaacgcccgcctggcggtggtcaagcgcagcatcgaggtcacccactttgcctaccccgcgctaaacctgccccccaaagtcatgaacgcggccatggacgggctgatcatgcgccgcggccggcccctcgctccagatgcaaacttgcatgaggagaccgaggacggccagcccgtggtcagcgacgagcagctggcgcgctggctggagaccgcggaccccgccgaactggaggagcggcgcaagatgatgatggccgcggtgctggtcaccgtagagctggagtgtctgcagcgcttcttcggcgaccccgagatgcagagaaaggtcgaggagaccctgcactacaccttccgccagggctacgtgcgccaggcttgcaagatctccaacgtggagctcagcaacctggtgtcctacctgggcatcttgcatgagaaccgcctcgggcagagcgtgctgcactccaccctgcgcggggaggcgcgccgcgactacgtgcgcgactgcgtttacctcttcctctgctacacctggcagacggccatgggggtctggcagcagtgtctggaggagcgcaacctcaaagagctggagaagctcctgcagcgcgcgctcaaagacctctggacgggctacaacgagcgctcggtggccgccgcgctggccgacctcatcttccccgagcgcctgctcaaaaccctccagcaggggctgcccgacttcaccagccaaagcatgttgcaaaacttcaggaactttatcctggagcgttctggcatcctacccgccacctgctgcgccctgcccagcgactttgtccccctcgtgtaccgcgagtgccccccgccgctgtggggtcactgctacctgttccaactggccaactacctgtcctaccacgcggacctcatggaggactccagcggcgaggggctcatggagtgccactgccgctgcaacctctgcacgccccaccgctccctggtctgcaacacccaactgctcagcgagagtcagattatcggtaccttcgagctacagggtccgtcctcctcagacgagaagtccgcggctccggggctaaaactcactccggggctgtggacttccgcctacctgcgcaaatttgtacctgaagactaccacgcccacgagatcaggttttacgaggaccaatcccgcccgcccaaggcggagctgaccgcctgcgtcatcacccagggcgagatcctaggccaattgcaagccatccaaaaagcccgccaagattttttgctgaagaagggtcggggggtgtatctggacccccagtcgggtgaggagctcaacccggttcccccgctgccgccgccgcgggaccttgcttcccaggataagcatcgccatggctcccagaaagaagcagcagcggccgccactgccgccaccccacatgctggaggaagaggaggaatactgggacagtcaggcagaggaggtttcggacgaggaggagccggagacggagatggaagagtgggaggaggacagcttagacgaggaggcttccgaagccgaagaggcagacgcaacaccgtcaccctcggccgcagccccctcgcaggcgcccccgaagtccgctcccagcatcagcagcaacagcagcgctataacctccgctcctccaccgccgcgacccacggccgaccgcagacccaaccgtagatgggacaccaccggaaccggggccggtaagtcctccgggagaggcaagcaagcgcagcgccaaggctaccgctcgtggcgcgctcacaagaacgccatagtcgcttgcttgcaagactgcggggggaacatctccttcgcccgccgcttcctgctcttccaccacggtgtggccttcccccgtaacgtcctgcattactaccgtcatctctacagcccctactgcggcggcagtgagccagagacggtcggcggcggcggcgcccgtttcggcgcctaggaagacccagggcaagacttcagccaagaaactcgcggcggccgcggcgaacgcggtcgcgggggccctgcgcctgacggtgaacgaacccctgtcgacccgcgaactgaggaaccgaatcttccccactctctatgccatcttccagcagagcagagggcaggatcaggaactgaaagtaaaaaacaggtctctgcgctccctcacccgcagctgtctgtatcacaagagcgaagaccagcttcggcgcacgctggaggacgctgaggcactcttcagcaaatactgcgcgctcactcttaaggactagctccgcgcccttctcgaatttaggcgggaacgcctacgtcatcgcagcgccgccgtcatgagcaaggacattcccacgccatacatgtggagctatcagccgcagatgggactcgcggcgggcgcctcccaagactactccacccgcatgaactggctcagtgccggcccacacatgatctcacaggttaatgatatccgcacccatcgaaaccaaatattggtggagcaggcggcgattaccaccacgccccgcaataatcccaaccccagggagtggcccgcgtccctggtgtatcaggaaattcccggccccaccaccgtactacttccgcgtgattcccaggccgaagtccaaatgactaactcaggggcgcagctcgcgggcggctgtcgtcacagggtgcggccccctcgccagggtataactcacctggagatccgaggcagaggtattcagctcaacgacgagtcggtgagctcctcgctcggtctcagacctgacgggaccttccagatagccggagccggccgatcttccttcacgccccgccaggcgtacctgactctgcagagctcgtcctcggcgccgcgctcgggcggcatcgggactctccagttcgtgcaggagtttgtgccctcggtctacttcaaccccttctccggctctcccggtcgctacccggaccagttcatctcgaactttgacgccgcgagggactcggtggacggctacgactgaatgtcgggtggacccggtgcagagcaacttcgcctgaagcacctcgaccactgccgccgccctcagtgctttgcccgctgtcagaccggtgagttccagtacttttccctgcccgactcgcacccggacggcccggcgcacggggtgcgctttttcatcccgagtcaggtgcgctctaccctaatcagggagtttaccgcccgtcccctactggcggagttggaaaaggggccttctatcctaaccattgcctgcatctgctctaaccctggattgcaccaagatctttgctgtcatttgtgtgctgagtataataaaggctgagatcagaatctactcgggctcctgtcgccatcctgtcaacgccaccgtccaagcccggcccgatcagcccgaggtgaacctcacctgcggtctgcaccggcgcctgagaaaatacctagcttggtactacaacagcactccctttgtggtttacaacagctttgaccaggacggggtctcactgagggataacctctcgaacctgagctactccatcaggaagaacagcaccctcgagctacttcctccttacctgcccgggacttaccagtgtgtcaccggtccctgcacccacacccacctgttgatcgtaaacgactctcttccgagaacagacctcaataactcctcttcgcagttccccagaacaggaggtgagctcaggaaaccccgggtaaagaagggtggacaagagttaacacttgtggggtttctggtgtatgtgacgctggtggtggctcttttgattaaggcttttccttccatgtctgaactctccctcttcttttatgaacaactcgactagtgctaacgggaccctacccaacgaatcgggattgaatatcggtaaccaggttgcagtttcacttttgattaccttcatagtcctcttcctgctagtgctgtcgcttctgtgcctgcggatcgggggctgctgcatccacgtttatatctggtgctggctgtttagaaggttcggagaccatcgcaggtagaataaacatgctgctgcttaccctctttgtcctggcgctggccgccagctgccaagccttttccgaggctgattttatagaaccccagtgcaatatcacttataaatctgaatataacctctgcactatcctaattaaatgcgttactcaacacgatgaggtaactgttagatacaaagatcaatcaaaaagagacgcactttacagcagctggcaaccaggagatgaacaaaaatacaatgtgaccgtcttccagggcaaactctccaaaacttacaattacactttcccattcgaggagatgtgtgagtttgtcatgttcatgtcaaagcagtacaagatgtggcctccgactccccagggctgtgtggaaaatccaggctctttctgcatgatctctctctgtgtaactgtgctggcactaatactcacgcttttgtatatcagatttaaatcaaggcaaagcttcatcgatgaaaagaaaatgccttaatcgcttttcacgcttgattgctaacaccgggtttttatccgcagaatgattggaatcaccctactaatcacctccctccttgcgattgcccatgggttggaacgaatcgaagtccctgtgggggccaatgttaccctggtggggcctgtcggcaatgctacattaatgtgggaaaaatatactaaaaatcaatgggtctcttactgcactaacaaaaacagccacaagcccagagccatctgcgatgggcaaaatttaaccttgattgatgttcaattgctggatgcgggctactattatgggcagctgggtacaatcgttaattactggagaccccacaaagattacatgcttcacgtagtaaagggtccccttagcagcccgaccactaccaccacctctaccacacccactaccaccactactcccatcaccagcactgccacccagcctcctcatagcagaacaaccacttttatcaattccaagtcccactccccccacattgccggcgggccctccgcctcaaactccgagaccaccgagatctgcttctgcaaatgctctgacgccattgcccaggatttggaagaccacgaggaagatgagcatgacttcgcagatgcatgccaggcatcaggggcagaagcactgccggtggccctcaaacagtatgcagactcccataccacccccgatcttccaccgccttcccagaagccaagtttcctgggggaaaatgaaacactgcctctctccatacttgctttgacatctgttgctattctgactgctctgctggtgctcctatgctctatatgctacctgatctgctgcaggaagaaaaaatctcacggccatgctcaccagccgcttatgcacttcccttaccctccagagttgggcgaccacaaactttaagtctgcagtagctatctgcccatcccttgtcagtcgacagcgatgagccccactaatctaacggcctctggacttacaacattgtctcttaatgagaccaccgctcctcaagacctgtacgatggtgtctccgcgctggttaaccagtgggatcacctgggcatatggtggctcctcataggagcagtgaccctgtgcctaatcctggtctggataatctgctgcatcaaaagcagaagacccaggcggcggcccatctacaggcccttcgtcatcacacctgaagatgatgatggcaccacgtccaggctgcagagcctaaagcagctactcttctcttttacagcatggtaaattgaacatgcctcgcattttcatctacttgtttcttcttccactctttttgggctcttctacattggcagctgtgtcccacatcgaggtagactgcatctcgcccttctcagtctacttactcttcggctttgtcatttgcaactttgtctgcagcgttatcactgtagtgatctgcttcatacagtgcatcgactacgtctgcgtacgggtggcctattttagacaccacccccagtatcgcaacagggacatagcggctctcctaagacttgtttaaatcatgcccaaattaactgtgattgctcttctgattatctgctgcgtcctagccgcgattgggactcagcctactaccaccaccaccagcgctcccagaaagagacatgtttcctgcagcttcaaacgtccctggaatataccccaatgctttactgatgaacctgaaatctctttggcttggtacttcagcgtcaccgcccttctcatcttctgcagtacggttattgcccttgccatttacccttcccttgacctgggctggaatgctgtcaactctatggaatatcccaccttcccagaaccagacctgccagacctggttgttctaaacgcgtttcctcctcctcccgttcaaaatcagtttcgccctccgtccccgacgcccactgaggtcagctactttaatctaacaggcggagatgactgaaaacctagacctagaaatggacggcctctgcagcgaacaacgcatactagagaggcgccggcaaaaagcagagctcgagcgtcttaaacaagagctccaagacgcggtggccatacaccagtgcaaaaaaggtgtcttctgtctagtgaaacaggccacgctcacctatgaaaaaacaggtgacacccaccgcctaggatacaagctgcccacacaacgccagaagttcgcccttatgataggcgaacaacccatcaccgtcacccagcactctgtggagacagaaggctgcatacacgctccctgcaggggcgctgactgtctctacaccttgatcaaaaccctctgcggccttagagacctcatccctttcaattgatcataactgtaatcaataaaaaatcacttacttgaaatctgatagcaagcctctgtccaattttttcagcaacacttccttcccctcctcccaactctggtactctaggcgcctcctagctgcaaacttcctccacagtctgaagggaatgtcagattcctcctcctgtccctccgcacccacgatcttcatgttgttgcagatgaaacgcgcgagatcgtctgacgagaccttcaaccccgtgtacccctacgataccgagatcgctccgacttctgtcccttttcccacccctccctttgtgtcccccgcaggaatgcaagaaaacccccctggagtgctatccctacgccttgcagaacccttgaccacctccaatggagcgctgaccctaaaaatggggggtggtttgaccctggacgaagaaggaaagcttacttcccaaaatattaccagtgttgatcctcctcttaaaaaaacaaaaaacaatatcagtctgcagactgcctccccccttgccgtcagctcgggagccctcacacttttcgctactcctcccctggcagttaatgacaataacctaactgtgcagtctcaggctccccttacactggaaaactcaaaactaagtctggccaccaaaggccccctaaccgtttctgaaggaaaacttgccctagaaacagaggctcccttgcatgcaagcgacagcagtagcctaggccttagtgtaacggccccactgagcattagcagcgacagcctaggactagacttgcaagcgcccattatttctgaaaatggaaaactgggcctaagagtaacaggtcccctaactgtggccagcagtattgatgctttgacagtagccacaggcagcggtattggacttgatagcaacacgcgcctacaggcaaaattggtcgcgcccctaggctttgacaccaatggcaacattaagctcagcacttcgggcggcatgagactgaacaatggcacacttatactagatgtaaactacccatttgaggctcaaggtcaacttagtctaagagtgggttcgggtccactgtatgtagactccaacacacataacctaaccgctagatgccttagagggctatacataacgtcatctaataaccaaaccggcctggaggccaacataaaacttacaaaaggacttgtgtttgatggaaatgccatagcagttaatgttagcaaagggctagaatacagtaccactgaaacagcgcagggtgtaaatcccatacagactaaaataggtttgggcatggaatatgataccaatggagccataaagccaagactaggctctggtttgagctttgataattcaggagctattgtagtgggaaacaaaaatgatgacactcttactctgtggactacaccagacccatctcccaactgtcagattaactcggaaaaagatgctaaactaaccttggtactaaccaagtgcggtagtcaaattgtaggcacagtatctgcctttgctcttaaaggcagccttgccccaattaatggcacagtgagctcagttagtatattcctaagatttaatgaaaatggggtactgatgagcaactcatcgttggaaagccaatactggaattacaggaatggaaattcaactaatgccacaccatatacaaatgcactaggttttatgcctaacctggcagcttatcccaaaggccaggcaacgactgcaaaaagcagcatcattagccaggtttacatgaatggtgacacttccaaacctatgatatttacaataacttttaatgggcttgaaacagaggaaactcaggtcagtacatattccatgacattttcatggaggtggacaaatggagactacgtggggcactattttaaaacaaactcctttactttctcctacattgcccaagaataaagaaagcacagagatgcttgtttttgatttcaaaattgtgtgcttttatttatttcaagcttacagtatttccagtagtcattcgaatagagcttaattaaactgcatgagaacccttccacatagcttaaattagcaccagtgcaaatggagaaaaatcaacatacctttttatccagatatcagagaactctagtggtcagttttcccccaccctcccagctcacagaatacacagtcctttccccccggctggctttaaacaacactatctcattggtaacagacatattcttaggtgtaataatccacacggtctcttggcgggccaaacgctggtcggtgatgttaataaactccccaggcagctctttcaagttcacgtcgctgtccaactgctgaagcgctcgcggctccgactgcgcctctagcggaggcaacggcaacacccgatccttgatctataaaggagtagagtcataatcccccataagaatagggcggtgatgcagcaacaaggcgcgcagcaactcctgccgccgcctctccgtacggcaggaatgcaacggcgtggtggtctcctccgcgataatccgcaccgctcgcagcatcagcatcctcgtcctccgggcacagcagcgcatcctgatctcactgagatcggcgcagtaagtgcagcacaaaaccaagatgttatttaagatcccacagtgcaaagcgctgtacccaaagctcatggcgggaaggacagcccccacgtgaccatcataccagatcctcaggtaaatcaaatgacgacctctcataaacacgctggacatgtacatcacctccttgggcatgtgctgattcaccacctctcgataccacaagcatcgctgattaattaaagacccctcgagcaccatcctgaaccaggaagccagcacctgaccccccgccaggcactgcagggaccccggtgaatcgcagtggcagtgaagactccagcgctcgtagccgtgaaccatagagctggtcattatatccaaattggcacaacacagacacactttcatacactttttcatgattagcagctcctctctagtcaggaccatatcccaaggaatcacccactcttgaatcaaggtaaatcccacacagcagggcaggcctctcacataactcacgttatgcatagtgagcgtgtcgcaatctggaaataccggatgatcttccatcaccgaagcccgggtctccgtctcaaagggaggtaaacggtccctcgtgtagggacagtggcgggataatcgagatcgtgttgaacgtagagtcatgccaaagggaacagcggacgtactcatatttcctccagcagaaccaagtgcgcgcgtggcagctatccctgcgtcttctgtctcgccgcctgccccgttcggtgtagtagttgtaatacagccactccctgagaccgtcaaggcgctccctggcgtccggatctatgacaacaccgtcctgcagcgccgccctgatgacatccaccaccgtagagtatgccaagcccagccaggaaatgcattcactttgacagcgagagataggaggagcggggagagatggaagaaccatgatagtaaagagaacttttattccaatcgatcttctaagatatcaaagtggagatctataagatgacactggtctcctccgctgagtcgatcaaaaataacagctaaaccacaaacaacacgattggtcaaatgctccacaagggcctgcagcataaaattgcctcggaactccaccgcaagcataacatcaaagccaccgcctctatcgtgatcaagaataaaaaccccacagctatccaccagacccatatagttttcatctctccatcgtgaaaaaagatttacaagctcctcctttaaatcacctccaaccaattgaaaaagttgaaccagaccgccctccaccttcattttcagcaagcgtatcatgattgcaaaaattcaggctcctcagacacctgtataagattgagaagcggaacgttaacatcgatgtttcgctcgcgtaaatcacgcctcagtgcaagcataatataatcccacaggtcggagcggatcagcgaggacacctccccgccaggaaccaactcaacggagcctatgctgattataatacgcatattcggagctatgctaaccagcacggcccccaaataggcgtactgcataggcggcgacaaaaagtgaacagtttgggttaaaaaatcaggcaaacactcgcgcaaaaaagcaagaacatcataaccatgctcatgcaaatagatgcaagtaagctcaggaacgaccacagaaaaatgcacaatttttctctcaaacatgactgcgagccctgcaaaaaataaaaaagaaacattacacaagagtagcctgtcttacgatgggatagactactctaaccaacataagacgggccacaacatcgcccgcgtggccataaaaaaaattgtccgtgtgattaaaaagaagcacagatagctggccagtcatatccggagtcatcacgtgtgaacccgtgtagacccccgggttggacacatcggccaaagaaagaaagcggccaatgtacccaggaggaattataacactaagacgaagatacaacagaataaccccatgagggggaataacaaagttagtaggtgaataaaaacgataaacacccgaaactccctcctgcgtaggcaaaatagcaccctccccttccaaaacaacatatagcgcttccacagcagccatgacaaaagactcaaaacactcaaaagactcagtcttaccaggaaaataaaagcactctcacagcaccagcactaatcagagtgtgaaaagggccaagtgccgaacgagtatatataggaataaaaaatgacgtaaatgtgtaaaggtcagaaaacgcccagaaaaatacacagaccaacgcccgaaacgaaaacccgcgaaaaaatacccagaacttcctcaacaaccgccacttccgctttctcacgatacgtcacttccgcaagaaaagcaaaactacatttcccacatgtgtaaaaacgaaaccccgccccttctaaccgcccacaacttacatcatcaaaacgtaaagtcctacgtcacccgccccgcctctccccgcccacctcattatcatattggccacaatccaaaataaggtatattattgatgatg

SEQ ID NO: 50 - DNA, 37074 bp, Gorilla beringei graueri
catcatcaataatataccttattttggattgtggccaatatgataatgaggtgggcggggagaggcggggcgggtgacgtaggacgcgcgagtagggttgggaggtgtggcggaagtgtggcatttgcaagtgggaggagctcacatgcaagcttccgtcgcggaaaatgtgacgtttttgatgagcgccgcctacctccggaagtgccaattttcgcgcgcttttcaccggatatcgtagtaattttgggcgggaccatgtaagatttggccattttcgcgcgaaaagtgaaacggggaagtgaaaactgaataatagggcgttagtcatagcgcgtaatatttaccgagggccgagggactttgaccgattacgtggaggactcgcccaggtgttttttacgtgaatttccgcgttccgggtcaaagtctccgtttttattgtcaccgtcatttgacgcggagggtatttaaacccgctgcgctcctcaagaggccactcttgagtgccagcgagaagagttttctcctctgctccgcttcggtgatcgaaaaatgagacacatagcctgcactccgggtcttttgtccggtcgggcggcggccgagcttttggacgctttgatcaatgatgtcctgagcgatgattttccgtctactacccactttagcccacctactcttcacgaactgtacgatctggatgtactggtggatgtgaacgatcccaacgaggaggcggtttctgcgttttttcccgagtctgcgctgttggccgctcaggagggatttgacctacacactccgccgcctattttagagtctccgctgccggagcccagtggtataccttatatgcctgaactgcttcccgaagtggtagacctgacctgccacgagcctggctttccgcccagcgacgatgatggtgagccttttgttttagactttgctgagatacctgggcacggttgcaggtcttgtgcatatcatcagagggttaccggagaccccgaggttaagtgttcgctgtgctatatgaggatgacctcttcctttatctacagtaagtttttgtctaggtgggcttttgggtaggtgggttttgtgtcagaacaggtgtaaacgttgcttgtgttttttgtacctgtaggtccggtgtccgagccagacccggagcccgaccgcgatcccgagccggatcccgagcctcctcgcaggacaaggaaactaccttccattctgtgcaagtctcagacacctgtaaggaccagcgaggcagacagcaccgactctggcacttctacctctccccctgaaattcacccagtggttcctctgggtatacataaacctgttgctgttagagtttgcgggcgacgccctgcagtacagtgcattgaggacttgcttcacgatcccgaggaacctttggacttgagccttaaacgccctaggcaataaaccccacctaagtaataaaccccacctaagtaataaaccctgccgcccttggttattgagatgacgcccaatgtttgcttttgaatgacttcatgtgtgtaataaaagtgagtgtgatcataggtctcttgtttgtctgggcggggcttaagggtatataagtttctcggggctaaacttggttacacttgaccccaatggaggcgtgggggtgcttggaggagtttgcggacgtgcgccgtttgctggacgagagctctaaccatacctatactatttggaggtatctgtggggctctactcaggccaagttggtctccagaattaagcaggattacaagtgcgattttgaagagctttttagttcctgcggtgagcttttgcaatccttgaatctgggccatcaggctattttccaggaaaaggttctctcgactttggatttttccactcccgggcgcaccgccgcttgtgtggcttttgtgtcttttgtgcaagataaatggagcgaggagacccacctgagtcacggctacgtactggatttcatggcgatggctctttggagggctcacaacaaatggaagattcagaaggaactgtacggttccgccctacgtcgtccacttttgtcgcgacaggggctgaggtttcccgaccatcggcagcatcagaatctggaagacgagtcggaggagcgagcggaggagaagatcagcttgagagccggcctggaccctcctcaggaggaatgaatctcccgcaggtggttgacctgtttccagaactgagacgggtcctgactatcagggaggatggtcagtttgtgaagaagtttaagagggatcggggtgagggagatgatgaggcggctagcaatttagcttttagtctgatgactcgccaccgaccggaatgtattacctatcagcagattaaggagagttgtgccaacgagctggatcttttgggtcagaagtatagcatagaacagcttaccacttactggcttcagcctggggatgattgggaagaggcgatcagggtgtatgcaaaggtggccctgcggcccgattgcaagtataagattactaagttggttaatattagaaactgctgctatatttctgggaacggggccgaagtggagatagatactcaggacagggtggcttttaggtgttgcatgataaacatgtggcccgggatactggggatggatggggtggtgttcatgaatgtgaggtttacgggccccaactttaatggcacggtgttcatgggcaacaccaacttgctcctgcatggtgcgagtttctatgggtttaataacacctgtatagaggcctggaccgatgtaaaggttcgaggttgttccttttatagctgttggaaggcggtggtgtgtcgccctaaaagcaggggttctgtgaaaaaatgcttgtttgaaaggtgcaccttaggcatcctctctgagggcaactccagggtgcgccataatgtggcttcgaactgcggttgcttcatgcaagtgaagggggtgagcgttatcaagcataactcggtgtgtggaaactgcgaggatcgcgcctcccagatgctgacctgctttgatggtaactgtcacctgttgaagaccattcatataagcagccaccccagaaaggcctggcccgtgtttgagcataacatcctgacccgctgctccttgcatctgggggtcaggaggggtatgttcctgccttaccagtgtaactttagccacactaaaatcctgctggaacccgagtgtatgaccaaggtcagcctaaatggcgtgtttgatgcgactctgagaatctggaaggtgctgaggtatgatgagaccaggaccaggtgccgaccctgcgagtgcggcggcaagcacatgagaaatcagcctgtgatgttggatgtgaccgaggagcttaggcctgaccatctggtgctggcctgcaccagggccgagtttgggtctagcgatgaggataccgattgaggtgggtaaggtgggcgtggctagaagggtggggcgtgtataaattgggggtctaagggtctctctgttttgtcttgcaacagccgccgccatgagcgacaccggcaacagctttgatggaagcatctttagcccctatctgacagtgcgcatgcctcactgggctggagtgcgtcagaatgtgatgggttccaacgtggatggacgccccgttctgccttcaaattcgtctacaatggcctacgcgaccgtgggaggaactccgctggacgccgcgacctccgccgccgcctccgccgccgccgcgaccgcgcgcagcatggctacggacctttacagctctttggtggcgagcagcgcggcctctcgcgcgtctgctcgggatgagaaactgaccgctctgctgcttaaactggaagacttgacccgggagctgggtcaactgacccagcaggtctccagcttgcgtgagagcagccttgcctccccctaatggcccataatataaataaaagccagtctgtttggattaagcaagtgtatgttctttatttaactctccgcgcgcggtaagcccgggaccagcggtctcggtcgtttagggtgcggtggattctttccaacacgtggtacaggtggctctggatgtttagatacatgggcatgagtccatccctggggtggaggtagcaccactgcagagcttcgtgctcgggggtggtgttgtatatgatccagtcgtagcaggagcgctgggcgtggtgctgaaaaatgtccttaagcaagaggcttatagctagggggaggcccttggtgtaagtgtttacaaatctgctcagttgggaggggtgcatccggggggatataatgtgcatcttggactggatttttaggttggctatgttcccacccagatcccttctgggattcatgttgtgcaggaccaccagcacggtatatccagtgcacttgggaaatttatcgtggagcttagacgggaatgcatggaagaacttggagacgcccttgtggcctcccagattttccatacattcgtccatgatgatggcaatgggcccgtgggaagctgcctgagcaaaaatgtttctgggatcgctcacatcgtagttatgttccagggtgaggtcatcataagacatctttacaaatcgggggcggagggtcccggactggggtatgatggtaccctcgggccccggggcgtagttcccctcacagatctgcatctcccaggctttcatttcagagggagggatcatatccacctgcggagcgatgaaaaacacagtttctggcgcaggggagattaactgggatgagagcaggtttctgagcagctgtgactttccacagccggtgggcccatatatcacgcctatcaccggctgcagctggtagttaagagagctgcagctgccgtcctcccggagcaggggggccacctcgttcagcatatccctgacgtggatgttctccctgaccaattccgccagaaggcgctcgccgcccagcgaaagcagctcttgcaaggaagcaaaatttttcagcggttttaggccgtcggccgtgggcatgtttttcagcgtctgggtcagcagttccagcctgtcccacagctcggtgatgtgctctacggcatctcgatccagcagatctcctcgtttcgcgggttggggcggctttcgctgtagggcaccagccgatgggcgtccagcggggccagagtcatgtccttccatgggcgcagggtcctcgtcagggtggtctgggtcacggtgaaggggtgcgctccgggttgggcgctggccagggtgcgcttgaggctggttctgctggtgctgaatcgctgccgctcttcgccctgcgcgtcggccaggtagcatttgaccatggtctcgtagtcgagaccctcggcggcgtgccccttggcgcggagctttcccttggaggtggcgccgcacgaggggcactgcaggctcttcagggcgtagagcttgggagcgagaaacacggactctggggagtaggcgtccgcgccgcaggaagcgcagaccgtctcgcattccaccagccaagtgagctccgggcggtcagggtcaaaaaccaggttgcccccatgctttttgatgcgtttcttacctcggctctccatgaggcggtgtcccttctcggtgacgaagaggctgtccgtgtccccgtagaccgacttcaggggcctgtcttccagcggagtgcctctgtcctcctcgtagagaaactctgaccactctgagacgaaggcccgcgtccaggccaggacgaaggaggccacgtgggaggggtagcggtcgttgtccactagcgggtccaccttctccagggtgtgcaggcacatgtccccctcctccgcgtccagaaaagtgattggcttgtaggtgtaggacacgtgaccgggggttcccgacgggggggtataaaagggggtgggcgccctttcatcttcactctcttccgcatcgctgtctgcgagagccagctgctggggtaagtattccctctcgaaggcgggcatgacctcagcgctcaggttgtcagtttctaaaaatgaggaggatttgatgttcacctgtcctgaggtgatacctttgagggtacctgggtccatctggtcagaaaacactatttttttgttgtcaagcttggtggcgaacgacccgtagagggcgttggagagcagcttggcgatggagcgcagggtctggtttttgtcgcggtcggctcgctccttggccgcgatgttgagttgcacgtactcgcgggccacgcacttccactcggggaagacggtggtgcgctcgtctgggatcaggcgcaccctccagcctcggttgtgcagggtgaccatgtcgacgctggtggcgacctcgccgcgcaggcgctcgttggtccagcagaggcggccgcccttgcgcgagcagaaggggggtagggggtccagctggtcctcgtttggggggtccgcgtcgatggtgaagaccccggggagcaagcgcgggtcaaagtagtcgatcttgcaagcttgcatgtccagagcccgctgccattcgcgggcggcgagcgcgcgctcgtaggggttgaggggcgggccccagggcatggggtgggtgagcgcggaggcgtacatgccgcagatgtcatacacgtacaggggttccctgaggatgccgaggtaggtggggtagcagcgccccccgcggatgctggcgcgcacgtagtcatagagctcgtgggagggggccagcatgttgggcccgaggttggtgcgctgggggcgctcggcgcggaaggcgatctgcctgaagatggcatgggagttggaggagatggtgggccgctggaagacgttgaagcttgcttcttgcaagcccaccgagtccctgacgaaggaggcgtaggactcgcgcagcttgtgcaccagctcggcggtgacctggacgtcgagcgcgcagtagtcgagggtctcgcggatgatgtcatacttatcctcccccttctttttccacagctcgcggttgaggacgaactcttcgcggtctttccagtactcttggaggggaaacccgtccgtgtccgaacggtaagagcctagcatgtagaactggttgacggcctggtaggggcaacagcccttctccacgggcagcgcgtaggcctgcgccgccttgcggagggaggtgtgggtgagggcgaaagtgtccctgaccatgactttgaggtattgatgtttgaagtctgtgtcatcgcagccgccctgttcccacagggtgtagtccgtgcgctttttggagcgcgggttgggcagggagaaggtgaggtcattgaagaggatcttccccgctcgaggcatgaagtttctggtgatgcgaaagggccctgggaccgaggagcggttgttgatgacctgggcggccaggacgatctcgtcaaagccgtttatgttgtggcccacgatgtagagctccaaaaagcggggctggcccttgatggaggggagctttttgagttcctcgtaggtgagctcctcgggcgattccaggccgtgctcctccagggcccagtcttgcaagtgagggttggccgccaggaaggatcgccagaggtcgcgggccatgagggtctgcaggcggtcgcggaaggttctgaactgtcgccccacggccatcttttcgggggtgatgcagtagaaggtgagggggtctttctcccaggggtcccatctgagctctcgggcgaggtcgcgcgcggcggcgaccagagcctcgtcgccccccagtttcatgaccagcatgaagggcacgagctgcttgccaaaggctcccatccaagtgtaggtctctacatcgtaggtgacaaagaggcgctccgtgcgaggatgagagccgatcgggaagaactggatctcccgccaccagttggaggattggctgttgatgtggtgaaagtagaagtcccgtctgcgggccgagcactcgtgctggcttttgtaaaagcgaccgcagtactggcagcgctgcacgggttgtatatcttgcacgaggtgaacctggcgacctctgacgaggaagcgcagcgggaatctaagtcccccgcctggggtcccgtgtggctggtggtcttctactttggttgtctggccgccagcatctgtctcctggagggcgatggtggagcagaccaccacgccgcgagagccgcaggtccagatctcggcgctcggcgggcggagtttgatgacgacatcgcgcacattggagctgtccatggtctccagctcccgcggcggcaggtcagctgggagttcctggaggttcacctcgcagagacgggtcaaggcgcgggcagtgttgagatggtatctgatttcaaggggcgtgttggcggcggagtcgatggcttgcaggaggccgcagccccggggggccacgatggttccccgcggggcgcgaggggaggcggaagctgggggtgtgttcagaagcggtgacgcgggcgggcccccggaggtagggggggttccggccccacgggcatgggcggcaggggcacgtcttcgccgcgcgcgggcaggggctggtgctggctccgaagagcgcttgcgtgcgcgacgacgcgacggttggtgtcctgtatctggcgcctctgagtgaagaccacgggtcccgtgaccttgaacctgaaagagagttcgacagaatcaatctcggcatcgttgacagcggcctggcgcaggatctcctgcacgtcgcccgagttgtcctggtaggcgatctctgccatgaactgctcgatctcttcctcctggagatctcctcgtccggcgcgctccacggtggccgccaggtcgttggagatgcgacccatgagctgcgagaaggcgttgagcccgccctcgttccagacccggctgtagaccacgcccccctcggcgtcgcgggcgcgcatgaccacctgggccaggttgagctccacgtgtcgcgtgaagacggcgtagttgcgcaggcgctggaaaaggtagttcagggtggtggcggtgtgctcggcgacgaagaagtacatgacccagcgccgcaacgtggattcattgatgtcccccaaggcctccaggcgctccatggcctcgtagaagtccacggcgaagttgaaaaactgggagttgcgagcggacacggtcaactcctcctccagaagacggatgagctcggcgacagtgtcgcgcacctcgcgctcgaaggccacggggggcgcttcttcctcttccacctcttcttccatgatcgcttcttcttcttcctcagccgggacgggagggggcggcggcggcgggggaggggcgcggcggcggcggcggcgcaccgggaggcggtcgatgaagcgctcgatcatctccccccgcatgcggcgcatggtctcggtgacggcgcggccgttctcccgggggcgcagctcgaagacgccgcctctcatctcgccgcggggcgggcggccgtgaggtagcgagacggcgctgactatgcatcttaacaattgctgtgtaggtacgccgccgagggacctgattgagtccagatccaccggatccgaaaacctttggaggaaagcgtctatccagtcgcagtcgcaaggtaggctgagcaccgtggcgggcgggggcgggtctggagagttcctggcggagatgctgctgatgatgtaattaaagtaggcggtcttgagaaggcggatggtggacaggagcaccatgtctttgggtccggcctgttggatgcggaggcggtcggccatgccccaggcctcgttctgacaccggcgcaggtctttgtagtagtcttgcatgagtctttccaccggcacctcttctccttcctcttctccatctcgccggtggtttctcgcgccgcccatgcgcgtgaccccaaagcccctgagcggctgcagcagggccaggtcggcgaccacgcgctcggccaagatggcctgctgcacctgagtgagggtcctctcgaagtcatccatgtccacgaagcggtggtaggcgcccgtgttgatggtgtaggtgcagttggccatgacggaccagttgacggtctggtgtcccggctgcgagagctccgtgtaccgcaggcgcgagaaggcgcgggaatcgaacacgtagtcgttgcaagtccgcaccagatactggtagcccaccaggaagtgcggcggaggttggcgatagaggggccagcgctgggtggcgggggcgccgggcgccaggtcttccagcataaggcggtggtatccgtagatgtacctggacatccaggtgatgccggcggcggtggtggtggcgcgcgcgtagtcgcggacccggttccagatgtttcgcaggggcaagaagtgttccatggtcggcacgctctggccggtgaggcgcgcgcagtcgttgacgctctatacacacacaaaaacgaaagcgtttacagggctttcgttctgtagcctggaggaaagtaaatgggttgggttgcggtgtgccccggttcgagaccaagctgagctcggccggctgaagccgcagctaacgtggtattggcagtcccgtctcgacccaggccctgtatcctccaggatacggtcgagagcccttttgctttcttggccaagcgcccgtggcgcgatctgggatagatggtcgcgatgagaggacaaaagcggctcgcttccgtagtctggagaaacaatcgccagggttgcgttgcggcgtaccccggttcgagcccctatggcggcttggatcggccggaaccgcggctaacgagggccgtggcagccccgtcctcaggaccccgccagccgacttctccagttacgggagcgagccccttttgtttttttattttttagatgcatcccgtgctgcggcagatgcgcccctcgccccggcccgatcagcagcagcaacagcaggcatgcagacccccctctcccctttccgccccggtcaccacggccgcggcggccgtgtcgggcgcggggggcgcgctggagtcagatgagccaccgcggcggcgacctaggcagtatctggacttggaagagggcgagggactggcgcggctgggggcgaactctccagagcgccacccgcgggtgcagttgaaaagggacgcgcgcgaggcgtacctgccgcggcagaacctgtttcgcgaccgcgggggcgaggagcccgaggagatgcgagactgcaggttccaagcggggcgcgagctgcggcgcgggctggacagacagcgcctgctgcgcgaggaggactttgagcccgacacgcagacgggcatcagccccgcgcgcgcgcacgtagccgcggccgacctggtgaccgcctacgagcagacggtgaaccaggagcgcaacttccaaaagagcttcaacaaccacgtgcgcacgctggtggcgcgcgaggaggtgaccctgggtctcatgcatctgtgggacctggtggaggcgatcgtgcagaaccccagcagcaagcccctgaccgcgcagctgttcctggtggtgcagcacagcagggacaacgaggccttcagggaggcgctgctgaacatcaccgagccggaggggcgctggctcctggacctgataaacatcctgcagagcatagtggtgcaggagcgcagcctgagcctggccgagaaggtggcggccatcaactactctatgctgagcctgggcaagttctacgcccgcaagatctacaagaccccctacgtgcccatagacaaggaggtgaagatagacagcttctacatgcgcatggcgctgaaggtgctgaccctgagcgacgacctgggagtgtaccgcaacgagcgcatccacaaggccgtgagcgccagccggcggcgcgagctgagcgaccgcgagctgatgcacagtctgcagcgcgcgctgaccggcgcgggcgagggcgacagggaggtcgagtcctacttcgacatgggggccgacctgcactggcagccgagccgccgcgccctggaggcggcgggggcgtacggcggccccctggcggacgatgaccaggaagaggaggactatgagctagaggagggcgagtacctggaggactgacctggctggtggtgttttggtatagatgcaagatccgaacgtggcggacccggcggtccgggcggcgctgcagagccagccgtccggcattaactcctctgacgactgggccgcggccatgagtcgcatcatggccctgaccgcgcgcaaccccgaggctttcaggcagcagcctcaggccaaccggctggcggccatcttggaagcggtagtgcccgcgcgctccaaccccacccacgagaaggtgctggccatagtcaacgcgctggcggagagcagggccatccgcgcggacgaggccggactggtgtacgatgcgctgctgcagcgggtggcgcggtacaacagcggcaacgtgcagaccaacctggaccgcctggtgacggatgtgcgcgaggccgtggcgcagcgcgagcgcttgcatcaggacggtaacctgggctcgctggtggcgctaaacgccttcctcagcacccagccggccaacgtaccgcgggggcaggaggactacaccaactttttgagcgcgctgcggctgatggtgaccgaggtccctcagagcgaggtgtaccagtcggggcccgactacttcttccagaccagcagacagggcttgcaaaccgtgaacctgagccaggctttgaagaacctgcgggggctgtggggagtgaaggcgcccaccggcgaccgggctacggtgtccagcctgctaacccccaactcgcgcctgctgctgctgctgatcgcgcccttcacggacagcgggagcgtctcgcgggaaacctatctgggccacctgctgacgctgtaccgcgaggccatcgggcaggcgcaggtggacgagcacaccttccaagagatcaccagcgtgagccacgcgctggggcaggaggacacgggcagcctgcaggcgaccctgaactacctgctgaccaacaggcggcagaagattcccacgctgcacagcctgacgcaggaggaggagcgcatcttgcgctacgtgcagcagagcgtgagcctgaacctgatgcgcgacggcgtgacgcccagcgtggcgctggacatgaccgcgcgcaacatggaaccgggcatgtacgcctcccaccggccgttcattaaccgcctgatggactacttgcatcgggcggcggccgtgaaccccgagtacttcactaatgccattctgaatccccactggatgccccctccgggtttctacaacggggacttcgaggtgcccgaggttaacgacgggttcctctgggatgacatggatgacagtgtgttctcacccaacccgctgcgcgccgcgtctctgcgattgaaggagggttctgacagggaaggaccgaggagtctggcctcctccctggctctgggagcggtgggcgcggcggcgcggggcagtagccccttccccagcctggcagactctctgaacagcgggcgggtgagcaggccccgcttgctaggcgaggaggagtatctgaacaactccctgctgcagcccgcgagggacaaaaacgctcagcggcagcagtttcccaacaatgggatagagagcctggtggacaagatgtccagatggaagacgtatgcgcaggagtacaaggagtgggaggaccgccagccgcggcccctgccgccccctaggcagcgctggcagcggcgcgcgtccaaccgccgctggaggcaggggcccgaggacgatgatgactctgcagatgacagcagcgtgctggacctgggcgggagcgggaaccccttttcgcacctgcgcccccgcctgggcaagatgttttaaaagagaaaaaataaaaactcaccaaggccatggcgacgagcgttggttttttgttcccttccttagtatgcgacgcgcggcgatgttcgaggaggggcctcccccctcttacgagagcgcgatgggattttctcctgcgacgcccctacagcctccctacgtgcctcctcggtacctgcaacctaccgggggaagaaatagcatctgttactctgagctgcagcccctgtatgacaccaccaaagtgtacctggtggacaacaagtctgcggacgtggcctccctgaactaccagaacgaccacagcgattttttgaccaccgtgatccaaaacaatgacttcaccccaaacgaggccagcacccagaccataaacctggacaacaggtcgcactggggcggtgatctgaagaccatcttgcacaccaacatgcccaacgtgaatgagtttatgtttactaactcttttaaggcgcgggtaatggtggcgcgcgacgataagggagtgcctaaatacgagtgggtggactttacactgcccgagggcaactactccgagatcatgactcttgacctgatgaacaacgcgatcgtggagcactacttgaaagtaggcaggcagaacggggtaaaagaaagcgatattggagttaagtttgacaccaggaactttcgcctgggatgggaccccgagacggggttggttatgcccggggtttacactaatgaagcttttcaccccgatatagtgctcttgcccggatgcggggtggacttcacccaaagccggctgagcaacctgctgggcattcgaaagcgccagccattccaggaggggtttcaaatcacttatgagcatttggaagggggcaacattccggcgcttctggatttggtcgcctacgaggagagtttgaaatccgaggaaagcggggataacactgacaagggcggcgaggagcaagccggcgatggcgacactgcttcggtagaaaacgaaagtgcgtccgtggtggaggcggcggcggtagcgaccgcagagccggagaccgtagaggaggatatgaatgatagcgcaatcagaggagactcgtttattccccggggcgaagaaaagaaggcggaggctgcggcagcagtcgaagcagagcccaaagtcgagtcggagatcatggaggaggatttgaatgataacgcgatcagaggtgatacgtttgtgccgcggggcgaagaaaaaaaagcggaggcggaggccgcggctgaggaggcggccgaggctgtggcagccaccgcggcggtgactgaaacaactgaggagcaggttcaggccgagcaggttcaaaagaagcccgtgattaaagccctaacacaagatagcaaggagcgcagttacaacttgattcccggtagtactgacaccgagtaccgcagctggtacctggcatacaactacggcgacccggtcaaaggggtgcgctcgtggactctgctttgcacgccggacgtcacctgcggctccgagcagatgtactggtcgttgccaaacatgatgcaagacccggtgaccttccgctccacgcggcaggttaacaacttcccggtggtgggcgccgaactgctgcccgtgcactccaagagcttttacaacgagcaggccgtgtactcccagctgatccgccaggccacctctctgacccacgtgttcaatcgctttcccgagaaccagattttggcgcgcccgccggcccccaccatcactaccgtcagtgaaaacgttcctgctctcacagatcacgggacgctaccgctgcgcaacagcatctcaggagtccagcgagtgaccattactgacgccagacgccggacctgcccctacgtttacaaggccttgggcatagtctcgccgcgcgtcctctccagccgcactttttaaaacacatattcacccacgcttcaaagattatgtctatacttatctcacccagcaataacaccggctgggggctgcgcgcgcccagcaagatgtttggaggggcgagaaaacgttccgagcagcacccagtgcgcgtgcgcggccactaccgcgcgccctggggagcgcacaagcgcgggcgcgcagggcgcaccactgtggacgacgccattgactccgtagtggagcaggcgcgccactacacacccggcgcgccgtccgcccccgccgtgtccaccgtggacgaggcgatcgaaagcgtggtacagggcgcgcggcactatgccaaccttaaaaatcgccgccgtcgcgtggcccgccgccatcgccggagaccccgggccaccgccgccgcgcgccttgctaaggctctactcaggcgcgccaggcgaactggccgccgggccgccatgagggccgcacggcgggctgccgccagtgcggccgccgcggccccacgggcacgaaggcgcgcggccgctgccgccgccgccgccatttccagcttggcctcaacgcggcgcggtaacatatactgggtgcgcgactcgataaccggcacgcgggtacccgtgcgctttcgccccccgcggaattagcacaagacaacatacacactgagtctcctgctgttgtgtatcccagcggcgaccgtcagcagcggcgacatgtccaagcgcaaaattaaagaagagatgctccaggtcatcgcgccggagatctatgggcccccgaagaaggaggaggatgattacaagccccgcaagctaaagcgggtcaaaaagaaaaagaaagatgatgatgatgacgaggcggtggagtttgtccgccgcatggcacccaggcgccccgtgcagtggaagggtcggcgcgtgcagcgcgttttgcgccccggcaccgcggtggtcttcacgcccggcgagcgctccacgcgcactttcaagcgggtgtacgatgaggtgtacggcgacgaggacctgttggagcaggccaaccagcgctttggggagtttgcatatgggaaacggccccgcgagagtctaaaagaggacctgctggcgctaccgctggacgagggcaatcccaccccgagtctgaagccggtgaccctgcaacaggtgctgcctttgagcgcgcccagcgagcataagcgagggttgaagcgcgagggcggggacctggcgcccaccgtgcagttgatggtgcccaagcggcagaagctggaggacgtgctggagaaaatgaaagtagagcccgggatccagcccgagatcaaggtccgccccatcaagcaggtggcgcccggcgtgggagtccagaccgtggacgttaggattcccacggaggagatggaaacccaaaccgccactccctcttcagcggccagcgccaccaccggcaccgcttcggtagaggtgcagacggacccctggctacccgccgccgctgtcgccgccgccgccgccccccgttctcgcgggcgcaagagaaattatccagtggccagcgcgctcatgccccagtacgcactgcatccatccatcgcgcccacccccggctaccgcgggtattcgtaccgcccgcgcagatcggccggcactcgcggccgccgccgccgtgcgaccacaaccagccgccgccgtcgccgccgccgccagccagtgctgacccccgtgtctgtaaggaaggtggctcgctcggggagcacgctggtggtgcccagagcgcgctaccaccccagcatcgtttaaagccggtctctgtatggttcttgcagatatggccctcacttgtcgcctccgcttcccggtgccgggataccgaggaagaactcaccgccgcagaggcatggcgggcagcggtctccgcggcggccgtcgccatcgccggcgcgcaaaaagcaggcgcatgcgcggcggtgtgctgcctctgctaatcccgctaatcgccgcggcgatcggtgccgtacccgggatcgcctccgtggccctgcaggcgtcccagaaacgttgactcttgcaaccttgcaagcttgcatttttttggaggaaaaaataaaaaagtctagactctcacgctcgcttggtcctgtgactattttgtagaaaaaagatggaagacatcaactttgcgtcgctggccccgcgtcatggctcgcgcccgttcatgggagactggacagatatcggcaccagcagtatgagcggtggcgccttcagctggggcagtctgtggagcggccttaaaaattttggttccaccattaaaaactatggcaacaaagcgtggaacagcagcacgggccagatgctaagagacaagttgaaagagcagaacttccaggagaaggtggcgcagggcctggcctctggcatcagcggggtggtggacatagctaaccaggccgtgcagaaaaagataaacagtcatctggacccccgccctcaggtggaggaaacgcctccagccatggagacggtgtttcccgagggcaaaggcgaaaagcgcccgcggcccgacagggaagagaccctggtgtcacacaccgaggagccgccctcttacgaggaggcactcaaggccggcctgcccaccactcgccccgtagctcccatggccacaggtgtggtgggccataaacaacacacccccgcaacactagatctgcccccgccgtccgagccgccgcgtcagccaaagacggcgacggtgcccgctccctccacttccgccgccaacagagtgtccctgcgccgcactacgggcgcccctcggggaccgcgactgagcggcaactggcagagcacactgaacagcattgtgggcctgggagtgaaaagtgtgaagcgccgccgttgctactgaatgagcaagctagctaacgtgttatatgtgtgtatgcgtcctatgtcgccgccagaggagctgttgagccgcccgcgccgtctgcactccagcgaatttcaagatggcgaccccttcgatgatgccacagtggtcgtacatgcacatctcgggccaggacgcctcggagtacctgagccccgggctggtgcagttcgcccgcgccaccgacagctacttcagcctaagtaacaaatttaggaaccctacggtggcacccacccacgatgtgaccacggaccggtcgcagcgcctgacgctgcggtttatccccgtggatcgggaggacactgcctactcttacaaggcgcgcttcacgctagccgtgggcgacaaccgcgtgctggacatggcctccacctactttgatatccggggtgtgctggacaggggtcccacctttaagccctactcgggcactgcctacaactccctggctcctaaaggcgctcccaattcttgcgagtgggatgaaaaaactaatactgctgaagcagccattgaaaatgaagaagagctggcggatgagccagaagagcaagcagaagaggctataaaaaccaatgtgtttgcccaggcgccatattctggcaatgcaatttccaaagaaggaatacaagtaggcatagaaggcattggagagcaagtaaaagccgtatacgcagacaaaacctaccagccggaacctcaggttggagaaactcaatggaatgagactgaaataaatcatggagcaggaagggtgctgaagaagaccactcccatgaagccttgctatggttcttatgctaaacctactaatgaatatggaggccagggcatccttgtagaaaaaaatggcaaaatggaaagccaggtggaaacacagttttttgctcttgacggtgaaaatgataatagtccaaaagtggtgttgtatagcgaagatgtaaacttggatactcctgacacacacctatcatacaaacctagcgcccaagatgtaaactctaaagaaatgttgggccaacaggccatgcccaacaggccaaatcttattgcttttagggacaactttattggacttatgtactacaacagcactggcaacatgggagtgctggcaggacaggcctcccaactaaatgccgtggtagacttgcaagacagaaacacagagttgtcataccagctgatgcttgattccattggagacagatcaagatattttgccatgtggaaccaggcggttgatagttacgatccagatgttagaattattgaaaaccatggcacagaggatgaacttccaaactactgttttcctttgggaggaatatttaatactcagagttttaaaaaggtaaaacctggaacggataacggatgggaaacagatgatgacttttcagataaaaatgaaataagagttggcaacaactttgccatggagatcaatatccaggcaaacctgtggagaagcttcttgtattccaatgtggctctctacctgccagataagatgaagtactctccaaccaacatagacatttccaccaacactaacacctatgactacatgaacaaaagagtggcgcctccaggcctggtggactgctatgtcaatctgggggccaggtggtcccttgatgtaatggataacatgaacccctttaaccaccaccgcaatgcgggcctgcgataccgttccatgcttctgggtaacggccgctacgtgcccttccacatccaggtgccccaaaagttctttgccatcaaaagccttctactcttgcctggctcgtacacctacgaatggaatttcagaaaggatgtgaacatggtcctacagagctctctgggcaacgaccttagggtggatggggccagcatcaagtttgacagcatcaccctttatgctacctttttccccatggcccacaacaccgcttccacgcttgaggccatgctcagaaacgacaccaacgaccagtccttcaatgactacctctctggggccaacatgctctaccccatccccgccaacgctaccaacgtgcccatctccattccctctcgcaactgggccgccttcagaggctgggcatttacccgccttaagaccaaggagaccccctccctgggctcgggttttgacccctactttgtctactcgggatccatcccctacctggatggcaccttctacctcaaccacacttttaagaagatatccatcatgtatgactcctctgtcagctggccgggcaacgaccgcctgctcacccccaatgagttcgaggtcaagcgcgccgtggacggcgagggctacaacgtggcccagtgcaacatgaccaaggactggttcctggtgcagatgctggccaactacaacataggctaccagggcttctacatcccagagagctacaaggacaggatgtactccttcttcagaaatttccaacccatgagcaggcaggtggtggacgagaccaaatacaaggactatcaggccgttggcatcactcaccagcacaacaactcgggattcgtgggctacctggcacccaccatgcgcgagggacaggcctaccccgccaacttcccctaccccttgataggcaagaccgcggtcgacagcgtcacccagaaaaagttcctctgcgaccgcaccctctggcgcatccccttttctagcaacttcatgtccatgggcgcgctcacggacctgggccagaacctgctctatgccaactccgcccatgcgctggacatgacttttgaggtggaccccatggacgagcccacccttctctatattgtgtttgaagtgttcgacgtggtcagagtgcaccagccgcaccgcggtgtcatcgagaccgtgtacctgcgcacgcccttctcggccggcaacgccaccacctaaggagacagcgccgccgcctgcatgacgggttccaccgagcaagagctcagggccatcgccagagacctgggatgcggaccctattttttgggcacctatgacaaacgcttcccgggcttcatctcccgagacaagctcgcctgcgccatcgtcaacacggccgcgcgcgagaccgggggcgtgcactggctggcctttggctgggacccgcgctccaaaacttgctacctctttgacccttttggcttctccgatcagcgcctcaagcagatctatgagtttgagtacgaggggctgctgcgccgcagcgcgcttgcctcctcgcccgaccgctgcatcacccttgagaagtccaccgagaccgtgcaggggccccactcggccgcctgcggtctcttctgctgcatgtttttgcacgcctttgtgcgctggccccagagtcccatggatcgcaaccccaccatgaacttgctcaagggagtgcccaacgccatgctccagagcccccaggtccagcccaccctgcgccacaaccaggaacagctctaccgcttcctggagcgccactccccctacttccgcagtcacagcgcgcgcatccggggggccacctctttctgccacttgcaagaaaacatgcaagacggaaaatgatgtacagctcgctttttaataaatgtaaagactgtgcactttatttatacacgggctctttctggttatttattcaacaccgccgtcgccatctagaaatcgaaagggttctgccgcgcgtcgccgtgcgccacgggcagagacacgttgcgatactggaagcggctcgcccacttgaactcgggcaccaccatgcggggcagtggttcctcggggaagttctcgccccacagggtgcgggtcagctgcagcgcgctcaggaggtcgggagccgagatcttgaagtcgcagttggggccggaaccctgcgcgcgcgagttgcggtacacggggttgcagcactggaacaccagcagggccggattatgcacgctggccagcaggctctcgtcgctgatcatgtcgctgtccagatcctccgcgttgctcagggcgaatggggtcatcttgcagacctgcctgcccaggaaaggcggcagcccgggcttgccgttgcagtcgcagcgcaggggcatcagcaggtgcccgcggcccgactgcgcctgcgggtacagcgcgcgcatgaaggcttcgatctgcctgaaagccacctgcgccttggctccctccgaaaagaacatcccacaggacttgctggagaactggttcgcgggacagctggcatcgtgcaggcagcagcgcgcgtcggtgttggcgatctgcaccacgttgcgaccccaccggttcttcactatcttggccttggaagcctgctccttcagcgcgcgctggccgttctcgctggtcacatccatctctatcacctgctccttgttgatcatgtttgtcccgtgcagacacttcaggtcgccctccgtctgggtgcagcggtgctcccacagcgcgcaaccggtgggctcccaattcttgtgggtcacccccgcgtaggcctgcaggtaggcctgcaagaagcgccccatcatggccacgaaggtcttctggctcgtaaaggtcagctgcaggccgcgatgctcttcgttcagccaggtcttgcagatggcggccagcgcctcggtctgctcgggcagcatcctaaaatttgtcttcaggtcgttatccacgtggtacttgtccatcatggcgcgcgccgcctccatgcccttctcccaggcggacaccatgggcaggcttagggggtttatcacttccaccggcgaggacaccgtactttcgatttcttcttcctccccctcttcccggcgcgcgcccacgctgctgcgcgctctcaccgcctgcaccaaggggtcgtcttcaggcaagcgccgcaccgagcgcttgccgcccttgacctgcttaatcagcaccggcgggttgctgaagcccaccatggtcagcgccgcctgctcttcttcgtcttcgctgtctaccactatctctggggaagggcttctccgctctgcggcggtgcgcttcttttttttcttgggagcagccgtgacggagtccgccacggcgacggaggtcgagggcgtggggctgggggtgcgcggtaccagggcctcgtcgccctcggactcttcctctgactccaggcggcggcggagtcgcttctttgggggcgcgcgcgtcagcggcggcggagacggggacggggacggggacgggacgccctccacagggggtggtcttcgcgcagacccgcggccgcgctcgggggtcctctcgagctggtcttggtctcgactggccattgtatcctcctcctcctaggcagagagacataaggagtctatcatgcaagtcgagaaggaggagagcttaaccaccccctctgacaccgccgatgcgcccgccgtcgccgtcgcccccgctgccgccgacgcgcccgccacaccgagcgacacccccgcggacccccccgccgacgcacccctgttcgaggaagcggccgtggagcaggacccgggctttgtctcggcagaggaggatttgcgagaggaggagaataaggagaagaagccctcagtgccaaaagatgataaagagcaagacgagcacgacgcagatgcacaccagggtgaagtcgggcggggggacggagggcatggcggcgccgactacctagacgaagggaacgacgtgctcttgaagcacctgcatcgtcagtgcgccatcgtttgcgacgctctgcaggagcgcagcgaagtgcccctcagcgtggcggaggtcagccacgcctacgagctcagcctcttctccccccgggtgcccccccgccgccgcgaaaacggcacatgcgagcccaacccgcgcctcaacttctaccccgccttcgtggtgcccgaggtcctggccacctatcacatcttctttcaaaattgcaagatccccctctcgtgccgcgccaaccgtagccgcgccgataagatgctggccctgcgccagggcgaccacatacctgatatcgccgctttggaagatgtgccaaagatctttgagggtctgggtcgcaacgagaagcgggcagcaaactctctgcaacaggaaaacagcgaaaatgagagtcacaccggggtactggtggagctcgagggcgacaacgcccgcctggcggtggtcaagcgcagcatcgaggtcacccactttgcctaccccgcgctaaacctgccccccaaagtcatgaacgcggccatggacgggctgatcatgcgccgcggccggcccctcgctccagatgcaaacttgcatgaggagaccgaggacggccagcccgtggtcagcgacgagcagctggcgcgctggctggagaccgcggaccccgccgaactggaggagcggcgcaagatgatgatggccgcggtgctggtcaccgtagagctggagtgtctgcagcgcttcttcggcgaccccgagatgcagagaaaggtcgaggagaccctgcactacaccttccgccagggctacgtgcgccaggcttgcaagatctccaacgtggagctcagcaacctggtgtcctacctgggcatcttgcatgagaaccgcctcgggcagagcgtgctgcactccaccctgcgcggggaggcgcgccgcgactacgtgcgcgactgcgtttacctcttcctctgctacacctggcagacggccatgggggtctggcagcagtgtctggaggagcgcaacctcaaagagctggagaagctcctgcagcgcgcgctcaaagacctctggacgggctacaacgagcgctcggtggccgccgcgctggccgacctcatcttccccgagcgcctgctcaaaaccctccagcaggggctgcccgacttcaccagccaaagcatgttgcaaaacttcaggaactttatcctggagcgttctggcatcctacccgccacctgctgcgccctgcccagcgactttgtccccctcgtgtaccgcgagtgccccccgccgctgtggggtcactgctacctgttccaactggccaactacctgtcctaccacgcggacctcatggaggactccagcggcgaggggctcatggagtgccactgccgctgcaacctctgcacgccccaccgctccctggtctgcaacacccaactgctcagcgagagtcagattatcggtaccttcgagctacagggtccgtcctcctcagacgagaagtccgcggctccggggctaaaactcactccggggctgtggacttccgcctacctgcgcaaatttgtacctgaagactaccacgcccacgagatcaggttttacgaggaccaatcccgcccgcccaaggcggagctgaccgcctgcgtcatcacccagggcgagatcctaggccaattgcaagccatccaaaaagcccgccaagattttttgctgaagaagggtcggggggtgtatctggacccccagtcgggtgaggagctcaacccggttcccccgctgccgccgccgcgggaccttgcttcccaggataagcatcgccatggctcccagaaagaagcagcagcggccgccactgccgccaccccacatgctggaggaagaggaggaatactgggacagtcaggcagaggaggtttcggacgaggaggagccggagacggagatggaagagtgggaggaggacagcttagacgaggaggcttccgaagccgaagaggcagacgcaacaccgtcaccctcggccgcagccccctcgcaggcgcccccgaagtccgctcccagcatcagcagcaacagcagcgctataacctccgctcctccaccgccgcgacccacggccgaccgcagacccaaccgtagatgggacaccaccggaaccggggccggtaagtcctccgggagaggcaagcaagcgcagcgccaaggctaccgctcgtggcgcgctcacaagaacgccatagtcgcttgcttgcaagactgcggggggaacatctccttcgcccgccgcttcctgctcttccaccacggtgtggccttcccccgtaacgtcctgcattactaccgtcatctctacagcccctactgcggcggcagtgagccagagacggtcggcggcggcggcgcccgtttcggcgcctaggaagacccagggcaagacttcagccaagaaactcgcggcggccgcggcgaacgcggtcgcgggggccctgcgcctgacggtgaacgaacccctgtcgacccgcgaactgaggaaccgaatcttccccactctctatgccatcttccagcagagcagagggcaggatcaggaactgaaagtaaaaaacaggtctctgcgctccctcacccgcagctgtctgtatcacaagagcgaagaccagcttcggcgcacgctggaggacgctgaggcactcttcagcaaatactgcgcgctcactcttaaggactagctccgcgcccttctcgaatttaggcgggaacgcctacgtcatcgcagcgccgccgtcatgagcaaggacattcccacgccatacatgtggagctatcagccgcagatgggactcgcggcgggcgcctcccaagactactccacccgcatgaactggctcagtgccggcccacacatgatctcacaggttaatgatatccgcacccatcgaaaccaaatattggtggagcaggcggcgattaccaccacgccccgcaataatcccaaccccagggagtggcccgcgtccctggtgtatcaggaaattcccggccccaccaccgtactacttccgcgtgattcccaggccgaagtccaaatgactaactcaggggcgcagctcgcgggcggctgtcgtcacagggtgcggccccctcgccagggtataactcacctggagatccgaggcagaggtattcagctcaacgacgagtcggtgagctcctcgctcggtctcagacctgacgggaccttccagatagccggagccggccgatcttccttcacgccccgccaggcgtacctgactctgcagagctcgtcctcggcgccgcgctcgggcggcatcgggactctccagttcgtgcaggagtttgtgccctcggtctacttcaaccccttctccggctctcccggtcgctacccggaccagttcatctcgaactttgacgccgcgagggactcggtggacggctacgactgaatgtcgggtggacccggtgcagagcaacttcgcctgaagcacctcgaccactgccgccgccctcagtgctttgcccgctgtcagaccggtgagttccagtacttttccctgcccgactcgcacccggacggcccggcgcacggggtgcgctttttcatcccgagtcaggtgcgctctaccctaatcagggagtttaccgcccgtcccctactggcggagttggaaaaggggccttctatcctaaccattgcctgcatctgctctaaccctggattgcaccaagatctttgctgtcatttgtgtgctgagtataataaaggctgagatcagaatctactcgggctcctgtcgccatcctgtcaacgccaccgtccaagcccggcccgatcagcccgaggtgaacctcacctgcggtctgcaccggcgcctgagaaaatacctagcttggtactacaacagcactccctttgtggtttacaacagctttgaccaggacggggtctcactgagggataacctctcgaacctgagctactccatcaggaagaacagcaccctcgagctacttcctccttacctgcccgggacttaccagtgtgtcaccggtccctgcacccacacccacctgttgatcgtaaacgactctcttccgagaacagacctcaataactcctcttcgcagttccccagaacaggaggtgagctcaggaaaccccgggtaaagaagggtggacaagagttaacacttgtggggtttctggtgtatgtgacgctggtggtggctcttttgattaaggcttttccttccatgtctgaactctccctcttcttttatgaacaactcgactagtgctaacgggaccctacccaacgaatcgggattgaatatcggtaaccaggttgcagtttcacttttgattaccttcatagtcctcttcctgctagtgctgtcgcttctgtgcctgcggatcgggggctgctgcatccacgtttatatctggtgctggctgtttagaaggttcggagaccatcgcaggtagaataaacatgctgctgcttaccctctttgtcctggcgctggccgccagctgccaagccttttccgaggctgattttatagaaccccagtgcaatatcacttataaatctgaatataacctctgcactatcctaattaaatgcgttactcaacacgatgaggtaactgttagatacaaagatcaatcaaaaagagacgcactttacagcagctggcaaccaggagatgaacaaaaatacaatgtgaccgtcttccagggcaaactctccaaaacttacaattacactttcccattcgaggagatgtgtgagtttgtcatgttcatgtcaaagcagtacaagatgtggcctccgactccccagggctgtgtggaaaatccaggctctttctgcatgatctctctctgtgtaactgtgctggcactaatactcacgcttttgtatatcagatttaaatcaaggcaaagcttcatcgatgaaaagaaaatgccttaatcgcttttcacgcttgattgctaacaccgggtttttatccgcagaatgattggaatcaccctactaatcacctccctccttgcgattgcccatgggttggaacgaatcgaagtccctgtgggggccaatgttaccctggtggggcctgtcggcaatgctacattaatgtgggaaaaatatactaaaaatcaatgggtctcttactgcactaacaaaaacagccacaagcccagagccatctgcgatgggcaaaatttaaccttgattgatgttcaattgctggatgcgggctactattatgggcagctgggtacaatcgttaattactggagaccccacaaagattacatgcttcacgtagtaaagggtccccttagcagcccgaccactaccaccacctctaccacacccactaccaccactactcccatcaccagcactgccacccagcctcctcatagcagaacaaccacttttatcaattccaagtcccactccccccacattgccggcgggccctccgcctcaaactccgagaccaccgagatctgcttctgcaaatgctctgacgccattgcccaggatttggaagaccacgaggaagatgagcatgacttcgcagatgcatgccaggcatcaggggcagaagcactgccggtggccctcaaacagtatgcagactcccataccacccccgatcttccaccgccttcccagaagccaagtttcctgggggaaaatgaaacactgcctctctccatacttgctttgacatctgttgctattctgactgctctgctggtgctcctatgctctatatgctacctgatctgctgcaggaagaaaaaatctcacggccatgctcaccagccgcttatgcacttcccttaccctccagagttgggcgaccacaaactttaagtctgcagtagctatctgcccatcccttgtcagtcgacagcgatgagccccactaatctaacggcctctggacttacaacattgtctcttaatgagaccaccgctcctcaagacctgtacgatggtgtctccgcgctggttaaccagtgggatcacctgggcatatggtggctcctcataggagcagtgaccctgtgcctaatcctggtctggataatctgctgcatcaaaagcagaagacccaggcggcggcccatctacaggcccttcgtcatcacacctgaagatgatgatggcaccacgtccaggctgcagagcctaaagcagctactcttctcttttacagcatggtaaattgaacatgcctcgcattttcatctacttgtttcttcttccactctttttgggctcttctacattggcagctgtgtcccacatcgaggtagactgcatctcgcccttctcagtctacttactcttcggctttgtcatttgcaactttgtctgcagcgttatcactgtagtgatctgcttcatacagtgcatcgactacgtctgcgtacgggtggcctattttagacaccacccccagtatcgcaacagggacatagcggctctcctaagacttgtttaaatcatgcccaaattaactgtgattgctcttctgattatctgctgcgtcctagccgcgattgggactcagcctactaccaccaccaccagcgctcccagaaagagacatgtttcctgcagcttcaaacgtccctggaatataccccaatgctttactgatgaacctgaaatctctttggcttggtacttcagcgtcaccgcccttctcatcttctgcagtacggttattgcccttgccatttacccttcccttgacctgggctggaatgctgtcaactctatggaatatcccaccttcccagaaccagacctgccagacctggttgttctaaacgcgtttcctcctcctcccgttcaaaatcagtttcgccctccgtccccgacgcccactgaggtcagctactttaatctaacaggcggagatgactgaaaacctagacctagaaatggacggcctctgcagcgaacaacgcatactagagaggcgccggcaaaaagcagagctcgagcgtcttaaacaagagctccaagacgcggtggccatacaccagtgcaaaaaaggtgtcttctgtctagtgaaacaggccacgctcacctatgaaaaaacaggtgacacccaccgcctaggatacaagctgcccacacaacgccagaagttcgcccttatgataggcgaacaacccatcaccgtcacccagcactctgtggagacagaaggctgcatacacgctccctgcaggggcgctgactgtctctacaccttgatcaaaaccctctgcggccttagagacctcatccctttcaattgatcataactgtaatcaataaaaaatcacttacttgaaatctgatagcaagcctctgtccaattttttcagcaacacttccttcccctcctcccaactctggtactctaggcgcctcctagctgcaaacttcctccacagtctgaagggaatgtcagattcctcctcctgtccctccgcacccacgatcttcatgttgttgcagatgaaacgcgcgagatcgtctgacgagaccttcaaccccgtgtacccctacgataccgagatcgctccgacttctgtcccttttcccacccctccctttgtgtcccccgcaggaatgcaagaaaacccccctggagtgctatccctacgccttgcagaacccttgaccacctccaatggagcgctgaccctaaaaatggggggtggtttgaccctggacgaagaaggaaagcttacttcccaaaatattaccagtgttgatcctcctcttaaaaaaacaaaaaacaatatcagtctgcagactgcctccccccttgccgtcagctcgggagccctcacacttttcgctactcctcccctggcagttaatgacaataacctaactgtgcagtctcaggctccccttacactggaaaactcaaaactaagtctggccaccaaaggccccctaaccgtttctgaaggaaaacttgccctagaaacagaggctcccttgcatgcaagcgacagcagtagcctaggccttagtgtaacggccccactgagcattagcagcgacagcctaggactagacttgcaagcgcccattatttctgaaaatggaaaactgggcctaagagtaacaggtcccctaactgtggccagcagtattgatgctttgacagtagccacaggcagcggtattggacttgatagcaacacgcgcctacaggcaaaattggtcgcgcccctaggctttgacaccaatggcaacattaagctcagcacttcgggcggcatgagactgaacaatggcacacttatactagatgtaaactacccatttgaggctcaaggtcaacttagtctaagagtgggttcgggtccactgtatgtagactccaacacacataacctaaccgctagatgccttagagggctatacataacgtcatctaataaccaaaccggcctggaggccaacataaaacttacaaaaggacttgtgtttgatggaaatgccatagcagttaatgttagcaaagggctagaatacagtaccactgaaacagcgcagggtgtaaatcccatacagactaaaataggtttgggcatggaatatgataccaatggagccataaagccaagactaggctctggtttgagctttgataattcaggagctattgtagtgggaaacaaaaatgatgacactcttactctgtggactacaccagacccatctcccaactgtcagattaactcggaaaaagatgctaaactaaccttggtactaaccaagtgcggtagtcaaattgtaggcacagtatctgcctttgctcttaaaggcagccttgccccaattaatggcacagtgagctcagttagtatattcctaagatttaatgaaaatggggtactgatgagcaactcatcgttggaaagccaatactggaattacaggaatggaaattcaactaatgccacaccatatacaaatgcactaggttttatgcctaacctggcagcttatcccaaaggccaggcaacgactgcaaaaagcagcatcattagccaggtttacatgaatggtgacacttccaaacctatgatatttacaataacttttaatgggcttgaaacagaggaaactcaggtcagtacatattccatgacattttcatggaggtggacaaatggagactacgtggggcactattttaaaacaaactcctttactttctcctacattgcccaagaataaagaaagcacagagatgcttgtttttgatttcaaaattgtgtgcttttatttatttcaagcttacagtatttccagtagtcattcgaatagagcttaattaaactgcatgagaacccttccacatagcttaaattagcaccagtgcaaatggagaaaaatcaacatacctttttatccagatatcagagaactctagtggtcagttttcccccaccctcccagctcacagaatacacagtcctttccccccggctggctttaaacaacactatctcattggtaacagacatattcttaggtgtaataatccacacggtctcttggcgggccaaacgctggtcggtgatgttaataaactccccaggcagctctttcaagttcacgtcgctgtccaactgctgaagcgctcgcggctccgactgcgcctctagcggaggcaacggcaacacccgatccttgatctataaaggagtagagtcataatcccccataagaatagggcggtgatgcagcaacaaggcgcgcagcaactcctgccgccgcctctccgtacggcaggaatgcaacggcgtggtggtctcctccgcgataatccgcaccgctcgcagcatcagcatcctcgtcctccgggcacagcagcgcatcctgatctcactgagatcggcgcagtaagtgcagcacaaaaccaagatgttatttaagatcccacagtgcaaagcgctgtacccaaagctcatggcgggaaggacagcccccacgtgaccatcataccagatcctcaggtaaatcaaatgacgacctctcataaacacgctggacatgtacatcacctccttgggcatgtgctgattcaccacctctcgataccacaagcatcgctgattaattaaagacccctcgagcaccatcctgaaccaggaagccagcacctgaccccccgccaggcactgcagggaccccggtgaatcgcagtggcagtgaagactccagcgctcgtagccgtgaaccatagagctggtcattatatccaaattggcacaacacagacacactttcatacactttttcatgattagcagctcctctctagtcaggaccatatcccaaggaatcacccactcttgaatcaaggtaaatcccacacagcagggcaggcctctcacataactcacgttatgcatagtgagcgtgtcgcaatctggaaataccggatgatcttccatcaccgaagcccgggtctccgtctcaaagggaggtaaacggtccctcgtgtagggacagtggcgggataatcgagatcgtgttgaacgtagagtcatgccaaagggaacagcggacgtactcatatttcctccagcagaaccaagtgcgcgcgtggcagctatccctgcgtcttctgtctcgccgcctgccccgttcggtgtagtagttgtaatacagccactccctgagaccgtcaaggcgctccctggcgtccggatctatgacaacaccgtcctgcagcgccgccctgatgacatccaccaccgtagagtatgccaagcccagccaggaaatgcattcactttgacagcgagagataggaggagcggggagagatggaagaaccatgatagtaaagagaacttttattccaatcgatcttctaagatatcaaagtggagatctataagatgacactggtctcctccgctgagtcgatcaaaaataacagctaaaccacaaacaacacgattggtcaaatgctccacaagggcctgcagcataaaattgcctcggaactccaccgcaagcataacatcaaagccaccgcctctatcgtgatcaagaataaaaaccccacagctatccaccagacccatatagttttcatctctccatcgtgaaaaaagatttacaagctcctcctttaaatcacctccaaccaattgaaaaagttgaaccagaccgccctccaccttcattttcagcaagcgtatcatgattgcaaaaattcaggctcctcagacacctgtataagattgagaagcggaacgttaacatcgatgtttcgctcgcgtaaatcacgcctcagtgcaagcataatataatcccacaggtcggagcggatcagcgaggacacctccccgccaggaaccaactcaacggagcctatgctgattataatacgcatattcggagctatgctaaccagcacggcccccaaataggcgtactgcataggcggcgacaaaaagtgaacagtttgggttaaaaaatcaggcaaacactcgcgcaaaaaagcaagaacatcataaccatgctcatgcaaatagatgcaagtaagctcaggaacgaccacagaaaaatgcacaatttttctctcaaacatgactgcgagccctgcaaaaaataaaaaagaaacattacacaagagtagcctgtcttacgatgggatagactactctaaccaacataagacgggccacaacatcgcccgcgtggccataaaaaaaattgtccgtgtgattaaaaagaagcacagatagctggccagtcatatccggagtcatcacgtgtgaacccgtgtagacccccgggttggacacatcggccaaagaaagaaagcggccaatgtacccaggaggaattataacactaagacgaagatacaacagaataaccccatgagggggaataacaaagttagtaggtgaataaaaacgataaacacccgaaactccctcctgcgtaggcaaaatagcaccctccccttccaaaacaacatatagcgcttccacagcagccatgacaaaagactcaaaacactcaaaagactcagtcttaccaggaaaataaaagcactctcacagcaccagcactaatcagagtgtgaaaagggccaagtgccgaacgagtatatataggaataaaaaatgacgtaaatgtgtaaaggtcagaaaacgcccagaaaaatacacagaccaacgcccgaaacgaaaacccgcgaaaaaatacccagaacttcctcaacaaccgccacttccgctttctcacgatacgtcacttccgcaagaaaagcaaaactacatttcccacatgtgtaaaaacgaaaccccgccccttctaaccgcccacaacttacatcatcaaaacgtaaagtcctacgtcacccgccccgcctctccccgcccacctcattatcatattggccacaatccaaaataaggtatattattgatgatg

SEQ ID NO: 51 - DNA, 37073 bp, Gorilla beringei graueri
catcatcaataatataccttattttggattgtggccaatatgataatgaggtgggcggggagaggcggggcgggtgacgtaggacgcgcgagtagggttgggaggtgtggcggaagtgtggcatttgcaagtgggaggagctcacatgcaagcttccgtcgcggaaaatgtgacgtttttgatgagcgccgcctacctccggaagtgccaattttcgcgcgcttttcaccggatatcgtagtaattttgggcgggaccatgtaagatttggccattttcgcgcgaaaagtgaaacggggaagtgaaaactgaataatagggcgttagtcatagcgcgtaatatttaccgagggccgagggactttgaccgattacgtggaggactcgcccaggtgttttttacgtgaatttccgcgttccgggtcaaagtctccgtttttattgtcaccgtcatttgacgcggagggtatttaaacccgctgcgctcctcaagaggccactcttgagtgccagcgagaagagttttctcctctgctccgcttcggtgatcgaaaaatgagacacatagcctgcactccgggtcttttgtccggtcgggcggcggccgagcttttggacgctttgatcaatgatgtcctgagcgatgattttccgtctactacccactttagcccacctactcttcacgaactgtacgatctggatgtactggtggatgtgaacgatcccaacgaggaggcggtttctgcgttttttcccgagtctgcgctgttggccgctcaggagggatttgacctacacactccgccgcctattttagagtctccgctgccggagcccagtggtataccttatatgcctgaactgcttcccgaagtggtagacctgacctgccacgagcctggctttccgcccagcgacgatgatggtgagccttttgttttagactttgctgagatacctgggcacggttgcaggtcttgtgcatatcatcagagggttaccggagaccccgaggttaagtgttcgctgtgctatatgaggatgacctcttcctttatctacagtaagtttttgtctaggtgggcttttgggtaggtgggttttgtgtcagaacaggtgtaaacgttgcttgtgttttttgtacctgtaggtccggtgtccgagccagacccggagcccgaccgcgatcccgagccggatcccgagcctcctcgcaggacaaggaaactaccttccattctgtgcaagtctcagacacctgtaaggaccagcgaggcagacagcaccgactctggcacttctacctctccccctgaaattcacccagtggttcctctgggtatacataaacctgttgctgttagagtttgcgggcgacgccctgcagtacagtgcattgaggacttgcttcacgatcccgaggaacctttggacttgagccttaaacgccctaggcaataaaccccacctaagtaataaaccccacctaagtaataaaccctgccgcccttggttattgagatgacgcccaatgtttgcttttgaatgacttcatgtgtgtaataaaagtgagtgtgatcataggtctcttgtttgtctgggcggggcttaagggtatataagtttctcggggctaaacttggttacacttgaccccaatggaggcgtgggggtgcttggaggagtttgcggacgtgcgccgtttgctggacgagagctctaaccatacctatactatttggaggtatctgtggggctctactcaggccaagttggtctccagaattaagcaggattacaagtgcgattttgaagagctttttagttcctgcggtgagcttttgcaatccttgaatctgggccatcaggctattttccaggaaaaggttctctcgactttggatttttccactcccgggcgcaccgccgcttgtgtggcttttgtgtcttttgtgcaagataaatggagcgaggagacccacctgagtcacggctacgtactggatttcatggcgatggctctttggagggctcacaacaaatggaagattcagaaggaactgtacggttccgccctacgtcgtccacttttgtcgcgacaggggctgaggtttcccgaccatcggcagcatcagaatctggaagacgagtcggaggagcgagcggaggagaagatcagcttgagagccggcctggaccctcctcaggaggaatgaatctcccgcaggtggttgacctgtttccagaactgagacgggtcctgactatcagggaggatggtcagtttgtgaagaagtttaagagggatcggggtgagggagatgatgaggcggctagcaatttagcttttagtctgatgactcgccaccgaccggaatgtattacctatcagcagattaaggagagttgtgccaacgagctggatcttttgggtcagaagtatagcatagaacagcttaccacttactggcttcagcctggggatgattgggaagaggcgatcagggtgtatgcaaaggtggccctgcggcccgattgcaagtataagattactaagttggttaatattagaaactgctgctatatttctgggaacggggccgaagtggagatagatactcaggacagggtggcttttaggtgttgcatgataaacatgtggcccgggatactggggatggatggggtggtgttcatgaatgtgaggtttacgggccccaactttaatggcacggtgttcatgggcaacaccaacttgctcctgcatggtgcgagtttctatgggtttaataacacctgtatagaggcctggaccgatgtaaaggttcgaggttgttccttttatagctgttggaaggcggtggtgtgtcgccctaaaagcaggggttctgtgaaaaaatgcttgtttgaaaggtgcaccttaggcatcctctctgagggcaactccagggtgcgccataatgtggcttcgaactgcggttgcttcatgcaagtgaagggggtgagcgttatcaagcataactcggtgtgtggaaactgcgaggatcgcgcctcccagatgctgacctgctttgatggtaactgtcacctgttgaagaccattcatataagcagccaccccagaaaggcctggcccgtgtttgagcataacatcctgacccgctgctccttgcatctgggggtcaggaggggtatgttcctgccttaccagtgtaactttagccacactaaaatcctgctggaacccgagtgtatgaccaaggtcagcctaaatggcgtgtttgatgcgactctgagaatctggaaggtgctgaggtatgatgagaccaggaccaggtgccgaccctgcgagtgcggcggcaagcacatgagaaatcagcctgtgatgttggatgtgaccgaggagcttaggcctgaccatctggtgctggcctgcaccagggccgagtttgggtctagcgatgaggataccgattgaggtgggtaaggtgggcgtggctagaagggtggggcgtgtataaattgggggtctaagggtctctctgttttgtcttgcaacagccgccgccatgagcgacaccggcaacagctttgatggaagcatctttagcccctatctgacagtgcgcatgcctcactgggctggagtgcgtcagaatgtgatgggttccaacgtggatggacgccccgttctgccttcaaattcgtctacaatggcctacgcgaccgtgggaggaactccgctggacgccgcgacctccgccgccgcctccgccgccgccgcgaccgcgcgcagcatggctacggacctttacagctctttggtggcgagcggcgcggcctctcgcgcgtctgctcgggatgagaaactgaccgctctgctgcttaaactggaagacttgacccgggagctggctcaactgacccagcaggtctccagcttgcgtgagagcagccttgcctccccctaatggcccataatataaataaaagccagtctgtttggattaagcaagtgtatgttctttatttaactctccgcgcgcggtaagcccgggaccagcggtctcggtcgtttagggtgcggtggattctttccaacacgtggtacaggtggctctggatgtttagatacatgggcatgagtccatccctggggtggaggtagcaccactgcagagcttcgtgctcgggggtggtgttgtatatgatccagtcgtagcaggagcgctgggcgtggtgctgaaaaatgtccttaagcaagaggcttatagctagggggaggcccttggtgtaagtgtttacaaatctgctcagttgggaggggtgcatccggggggatataatgtgcatcttggactggatttttaggttggctatgttcccacccagatcccttctgggattcatgttgtgcaggaccaccagcacggtatatccagtgcacttgggaaatttatcgtggagcttagacgggaatgcatggaagaacttggagacgcccttgtggcctcccagattttccatacattcgtccatgatgatggcaatgggcccgtgggaagctgcctgagcaaaaatgtttctgggatcgctcacatcgtagttatgttccagggtgaggtcatcataagacatctttacaaatcgggggcggagggtcccggactggggtatgatggtaccctcgggccccggggcgtagttcccctcacagatctgcatctcccaggctttcatttcagagggagggatcatatccacctgcggagcgatgaaaaacacagtttctggcgcaggggagattaactgggatgagagcaggtttctgagcagctgtgactttccacagccggtgggcccatatatcacgcctatcaccggctgcagctggtagttaagagagctgcagctgccgtcctcccggagcaggggggccacctcgttcagcatatccctgacgtggatgttctccctgaccaattccgccagaaggcgctcgccgcccagcgaaagcagctcttgcaaggaagcaaaatttttcagcggttttaggccgtcggccgtgggcatgtttttcagcgtctgggtcagcagttccagcctgtcccacagctcggtgatgtgctctacggcatctcgatccagcagatctcctcgtttcgcgggttggggcggctttcgctgtagggcaccagccgatgggcgtccagcggggccagagtcatgtccttccatgggcgcagggtcctcgtcagggtggtctgggtcacggtgaaggggtgcgctccgggttgggcgctggccagggtgcgcttgaggctggttctgctggtgctgaatcgctgccgctcttcgccctgcgcgtcggccaggtagcatttgaccatggtctcgtagtcgagaccctcggcggcgtgccccttggcgcggagctttcccttggaggtggcgccgcacgaggggcactgcaggctcttcagggcgtagagcttgggagcgagaaacacggactctggggagtaggcgtccgcgccgcaggaagcgcagaccgtctcgcattccaccagccaagtgagctccgggcggtcagggtcaaaaaccaggttgcccccatgctttttgatgcgtttcttacctcggctctccatgaggcggtgtcccttctcggtgacgaagaggctgtccgtgtccccgtagaccgacttcaggggcctgtcttccagcggagtgcctctgtcctcctcgtagagaaactctgaccactctgagacgaaggcccgcgtccaggccaggacgaaggaggccacgtgggaggggtagcggtcgttgtccactagcgggtccaccttctccagggtgtgcaggcacatgtccccctcctccgcgtccagaaaagtgattggcttgtaggtgtaggacacgtgaccgggggttcccgacgggggggtataaaagggggtgggcgccctttcatcttcactctcttccgcatcgctgtctgcgagagccagctgctggggtaagtattccctctcgaaggcgggcatgacctcagcgctcaggttgtcagtttctaaaaatgaggaggatttgatgttcacctgtcctgaggtgatacctttgagggtacctgggtccatctggtcagaaaacactatttttttgttgtcaagcttggtggcgaacgacccgtagagggcgttggagagcagcttggcgatggagcgcagggtctggtttttgtcgcggtcggctcgctccttggccgcgatgttgagttgcacgtactcgcgggccacgcacttccactcggggaagacggtggtgcgctcgtctgggatcaggcgcaccctccagcctcggttgtgcagggtgaccatgtcgacgctggtggcgacctcgccgcgcaggcgctcgttggtccagcagaggcggccgcccttgcgcgagcagaaggggggtagggggtccagctggtcctcgtttggggggtccgcgtcgatggtgaagaccccggggagcaagcgcgggtcaaagtagtcgatcttgcaagcttgcatgtccagagcccgctgccattcgcgggcggcgagcgcgcgctcgtaggggttgaggggcgggccccagggcatggggtgggtgagcgcggaggcgtacatgccgcagatgtcatacacgtacaggggttccctgaggatgccgaggtaggtggggtagcagcgccccccgcggatgctggcgcgcacgtagtcatagagctcgtgggagggggccagcatgttgggcccgaggttggtgcgctgggggcgctcggcgcggaaggcgatctgcctgaagatggcatgggagttggaggagatggtgggccgctggaagacgttgaagcttgcttcttgcaagcccaccgagtccctgacgaaggaggcgtaggactcgcgcagcttgtgcaccagctcggcggtgacctggacgtcgagcgcgcagtagtcgagggtctcgcggatgatgtcatacttatcctcccccttctttttccacagctcgcggttgaggacgaactcttcgcggtctttccagtactcttggaggggaaacccgtccgtgtccgaacggtaagagcctagcatgtagaactggttgacggcctggtaggggcaacagcccttctccacgggcagcgcgtaggcctgcgccgccttgcggagggaggtgtgggtgagggcgaaagtgtccctgaccatgactttgaggtattgatgtttgaagtctgtgtcatcgcagccgccctgttcccacagggtgtagtccgtgcgctttttggagcgcgggttgggcagggagaaggtgaggtcattgaagaggatcttccccgctcgaggcatgaagtttctggtgatgcgaaagggccctgggaccgaggagcggttgttgatgacctgggcggccaggacgatctcgtcaaagccgtttatgttgtggcccacgatgtagagctccaaaaagcggggctggcccttgatggaggggagctttttgagttcctcgtaggtgagctcctcgggcgattccaggccgtgctcctccagggcccagtcttgcaagtgagggttggccgccaggaaggatcgccagaggtcgcgggccatgagggtctgcaggcggtcgcggaaggttctgaactgtcgccccacggccatcttttcgggggtgatgcagtagaaggtgagggggtctttctcccaggggtcccatctgagctctcgggcgaggtcgcgcgcggcggcgaccagagcctcgtcgccccccagtttcatgaccagcatgaagggcacgagctgcttgccaaaggctcccatccaagtgtaggtctctacatcgtaggtgacaaagaggcgctccgtgcgaggatgagagccgatcgggaagaactggatctcccgccaccagttggaggattggctgttgatgtggtgaaagtagaagtcccgtctgcgggccgagcactcgtgctggcttttgtaaaagcgaccgcagtactggcagcgctgcacgggttgtatatcttgcacgaggtgaacctggcgacctctgacgaggaagcgcagcgggaatctaagtcccccgcctggggtcccgtgtggctggtggtcttctactttggttgtctggccgccagcatctgtctcctggagggcgatggtggagcagaccaccacgccgcgagagccgcaggtccagatctcggcgctcggcgggcggagtttgatgacgacatcgcgcacattggagctgtccatggtctccagctcccgcggcggcaggtcagctgggagttcctggaggttcacctcgcagagacgggtcaaggcgcgggcagtgttgagatggtatctgatttcaaggggcgtgttggcggcggagtcgatggcttgcaggaggccgcagccccggggggccacgatggttccccgcggggcgcgaggggaggcggaagctgggggtgtgttcagaagcggtgacgcgggcgggcccccggaggtagggggggttccggccccacgggcatgggcggcaggggcacgtcttcgccgcgcgcgggcaggggctggtgctggctccgaagagcgcttgcgtgcgcgacgacgcgacggttggtgtcctgtatctggcgcctctgagtgaagaccacgggtcccgtgaccttgaacctgaaagagagttcgacagaatcaatctcggcatcgttgacagcggcctggcgcaggatctcctgcacgtcgcccgagttgtcctggtaggcgatctctgccatgaactgctcgatctcttcctcctggagatctcctcgtccggcgcgctccacggtggccgccaggtcgttggagatgcgacccatgagctgcgagaaggcgttgagcccgccctcgttccagacccggctgtagaccacgcccccctcggcgtcgcgggcgcgcatgaccacctgggccaggttgagctccacgtgtcgcgtgaagacggcgtagttgcgcaggcgctggaaaaggtagttcagggtggtggcggtgtgctcggcgacgaagaagtacatgacccagcgccgcaacgtggattcattgatgtcccccaaggcctccaggcgctccatggcctcgtagaagtccacggcgaagttgaaaaactgggagttgcgagcggacacggtcaactcctcctccagaagacggatgagctcggcgacagtgtcgcgcacctcgcgctcgaaggccacggggggcgcttcttcctcttccacctcttcttccatgatcgcttcttcttcttcctcagccgggacgggagggggcggcggcggcgggggaggggcgcggcggcggcggcggcgcaccgggaggcggtcgatgaagcgctcgatcatctccccccgcatgcggcgcatggtctcggtgacggcgcggccgttctcccgggggcgcagctcgaagacgccgcctctcatctcgccgcggggcgggcggccgtgaggtagcgagacggcgctgactatgcatcttaacaattgctgtgtaggtacgccgccgagggacctgattgagtccagatccaccggatccgaaaacctttggaggaaagcgtctatccagtcgcagtcgcaaggtaggctgagcaccgtggcgggcgggggcgggtctggagagttcctggcggagatgctgctgatgatgtaattaaagtaggcggtcttgagaaggcggatggtggacaggagcaccatgtctttgggtccggcctgttggatgcggaggcggtcggccatgccccaggcctcgttctgacaccggcgcaggtctttgtagtagtcttgcatgagtctttccaccggcacctcttctccttcctcttctccatctcgccggtggtttctcgcgccgcccatgcgcgtgaccccaaagcccctgagcggctgcagcagggccaggtcggcgaccacgcgctcggccaagatggcctgctgcacctgagtgagggtcctctcgaagtcatccatgtccacgaagcggtggtaggcgcccgtgttgatggtgtaggtgcagttggccatgacggaccagttgacggtctggtgtcccggctgcgagagctccgtgtaccgcaggcgcgagaaggcgcgggaatcgaacacgtagtcgttgcaagtccgcaccagatactggtagcccaccaggaagtgcggcggaggttggcgatagaggggccagcgctgggtggcgggggcgccgggcgccaggtcttccagcataaggcggtggtatccgtagatgtacctggacatccaggtgatgccggcggcggtggtggtggcgcgcgcgtagtcgcggacccggttccagatgtttcgcaggggcaagaagtgttccatggtcggcacgctctggccggtgaggcgcgcgcagtcgttgacgctctatacacacacaaaaacgaaagcgtttacagggctttcgttctgtagcctggaggaaagtaaatgggttgggttgcggtgtgccccggttcgagaccaagctgagctcggccggctgaagccgcagctaacgtggtattggcagtcccgtctcgacccaggccctgtatcctccaggatacggtcgagagcccttttgctttcttggccaagcgcccgtggcgcgatctgggatagatggtcgcgatgagaggacaaaagcggctcgcttccgtagtctggagaaacaatcgccagggttgcgttgcggcgtaccccggttcgagcccctatggcggcttggatcggccggaaccgcggctaacgagggccgtggcagccccgtcctcaggaccccgccagccgacttctccagttacgggagcgagccccttttgtttttttattttttagatgcatcccgtgctgcggcagatgcgcccctcgccccggcccgatcagcagcagcaacagcaggcatgcagacccccctctcccctttccgccccggtcaccacggccgcggcggccgtgtcgggcgcggggggcgcgctggagtcagatgagccaccgcggcggcgacctaggcagtatctggacttggaagagggcgagggactggcgcggctgggggcgaactctccagagcgccacccgcgggtgcagttgaaaagggacgcgcgcgaggcgtacctgccgcggcagaacctgtttcgcgaccgcgggggcgaggagcccgaggagatgcgagactgcaggttccaagcggggcgcgagctgcggcgcgggctggacagacagcgcctgctgcgcgaggaggactttgagcccgacacgcagacgggcatcagccccgcgcgcgcgcacgtagccgcggccgacctggtgaccgcctacgagcagacggtgaaccaggagcgcaacttccaaaagagcttcaacaaccacgtgcgcacgctggtggcgcgcgaggaggtgaccctgggtctcatgcatctgtgggacctggtggaggcgatcgtgcagaaccccagcagcaagcccctgaccgcgcagctgttcctggtggtgcagcacagcagggacaacgaggccttcagggaggcgctgctgaacatcaccgagccggaggggcgctggctcctggacctgataaacatcctgcagagcatagtggtgcaggagcgcagcctgagcctggccgagaaggtggcggccatcaactactctatgctgagcctgggcaagttctacgcccgcaagatctacaagaccccctacgtgcccatagacaaggaggtgaagatagacagcttctacatgcgcatggcgctgaaggtgctgaccctgagcgacgacctgggagtgtaccgcaacgagcgcatccacaaggccgtgagcgccagccggcggcgcgagctgagcgaccgcgagctgatgcacagtctgcagcgcgcgctgaccggcgcgggcgagggcgacagggaggtcgagtcctacttcgacatgggggccgacctgcactggcagccgagccgccgcgccctggaggcggcgggggcgtacggcggccccctggcggacgatgaccaggaagaggaggactatgagctagaggagggcgagtacctggaggactgacctggctggtggtgttttggtatagatgcaagatccgaacgtggcggacccggcggtccgggcggcgctgcagagccagccgtccggcattaactcctctgacgactgggccgcggccatgagtcgcatcatggccctgaccgcgcgcaaccccgaggctttcaggcagcagcctcaggccaaccggctggcggccatcttggaagcggtagtgcccgcgcgctccaaccccacccacgagaaggtgctggccatagtcaacgcgctggcggagagcagggccatccgcgcggacgaggccggactggtgtacgatgcgctgctgcagcgggtggcgcggtacaacagcggcaacgtgcagaccaacctggaccgcctggtgacggatgtgcgcgaggccgtggcgcagcgcgagcgcttgcatcaggacggtaacctgggctcgctggtggcgctaaacgccttcctcagcacccagccggccaacgtaccgcgggggcaggaggactacaccaactttttgagcgcgctgcggctgatggtgaccgaggtccctcagagcgaggtgtaccagtcggggcccgactacttcttccagaccagcagacagggcttgcaaaccgtgaacctgagccaggctttgaagaacctgcgggggctgtggggagtgaaggcgcccaccggcgaccgggctacggtgtccagcctgctaacccccaactcgcgcctgctgctgctgctgatcgcgcccttcacggacagcgggagcgtctcgcgggaaacctatctgggccacctgctgacgctgtaccgcgaggccatcgggcaggcgcaggtggacgagcacaccttccaagagatcaccagcgtgagccacgcgctggggcaggaggacacgggcagcctgcaggcgaccctgaactacctgctgaccaacaggcggcagaagattcccacgctgcacagcctgacgcaggaggaggagcgcatcttgcgctacgtgcagcagagcgtgagcctgaacctgatgcgcgacggcgtgacgcccagcgtggcgctggacatgaccgcgcgcaacatggaaccgggcatgtacgcctcccaccggccgttcattaaccgcctgatggactacttgcatcgggcggcggccgtgaaccccgagtacttcactaatgccattctgaatccccactggatgccccctccgggtttctacaacggggacttcgaggtgcccgaggttaacgacgggttcctctgggatgacatggatgacagtgtgttctcacccaacccgctgcgcgccgcgtctctgcgattgaaggagggttctgacagggaaggaccgaggagtctggcctcctccctggctctgggagcggtgggcgcggcggcgcggggcagtagccccttccccagcctggcagactctctgaacagcgggcgggtgagcaggccccgcttgctaggcgaggaggagtatctgaacaactccctgctgcagcccgcgagggacaaaaacgctcagcggcagcagtttcccaacaatgggatagagagcctggtggacaagatgtccagatggaagacgtatgcgcaggagtacaaggagtgggaggaccgccagccgcggcccctgccgccccctaggcagcgctggcagcggcgcgcgtccaaccgccgctggaggcaggggcccgaggacgatgatgactctgcagatgacagcagcgtgctggacctgggcgggagcgggaaccccttttcgcacctgcgcccccgcctgggcaagatgttttaaaagagaaaaaataaaaactcaccaaggccatggcgacgagcgttggttttttgttcccttccttagtatgcgacgcgcggcgatgttcgaggaggggcctcccccctcttacgagagcgcgatgggattttctcctgcgacgcccctacagcctccctacgtgcctcctcggtacctgcaacctaccgggggaagaaatagcatctgttactctgagctgcagcccctgtatgacaccaccaaagtgtacctggtggacaacaagtctgcggacgtggcctccctgaactaccagaacgaccacagcgattttttgaccaccgtgatccaaaacaatgacttcaccccaaacgaggccagcacccagaccataaacctggacaacaggtcgcactggggcggtgatctgaagaccatcttgcacaccaacatgcccaacgtgaatgagtttatgtttactaactcttttaaggcgcgggtaatggtggcgcgcgacgataagggagtgcctaaatacgagtgggtggactttacactgcccgagggcaactactccgagatcatgactcttgacctgatgaacaacgcgatcgtggagcactacttgaaagtaggcaggcagaacggggtaaaagaaagcgatattggagttaagtttgacaccaggaactttcgcctgggatgggaccccgagacggggttggttatgcccggggtttacactaatgaagcttttcaccccgatatagtgctcttgcccggatgcggggtggacttcacccaaagccggctgagcaacctgctgggcattcgaaagcgccagccattccaggaggggtttcaaatcacttatgagcatttggaagggggcaacattccggcgcttctggatttggtcgcctacgaggagagtttgaaatccgaggaaagcggggataacactgacaagggcggcgaggagcaagccggcgatggcgacactgcttcggtagaaaacgaaagtgcgtccgtggtggaggcggcggcggtagcgaccgcagagccggagaccgtagaggaggatatgaatgatagcgcaatcagaggagactcgtttattccccggggcgaagaaaagaaggcggaggctgcggcagcagtcgaagcagagcccaaagtcgagtcggagatcatggaggaggatttgaatgataacgcgatcagaggtgatacgtttgtgccgcggggcgaagaaaaaaaagcggaggcggaggccgcggctgaggaggcggccgaggctgtggcagccaccgcggcggtgactgaaacaactgaggagcaggttcaggccgagcaggttcaaaagaagcccgtgattaaagccctaacacaagatagcaaggagcgcagttacaacttgattcccggtagtactgacaccgagtaccgcagctggtacctggcatacaactacggcgacccggtcaaaggggtgcgctcgtggactctgctttgcacgccggacgtcacctgcggctccgagcagatgtactggtcgttgccaaacatgatgcaagacccggtgaccttccgctccacgcggcaggttaacaacttcccggtggtgggcgccgaactgctgcccgtgcactccaagagcttttacaacgagcaggccgtgtactcccagctgatccgccaggccacctctctgacccacgtgttcaatcgctttcccgagaaccagattttggcgcgcccgccggcccccaccatcactaccgtcagtgaaaacgttcctgctctcacagatcacgggacgctaccgctgcgcaacagcatctcaggagtccagcgagtgaccattactgacgccagacgccggacctgcccctacgtttacaaggccttgggcatagtctcgccgcgcgtcctctccagccgcactttttaaaacacatattcacccacgcttcaaagattatgtctatacttatctcacccagcaataacaccggctgggggctgcgcgcgcccagcaagatgtttggaggggcgagaaaacgttccgagcagcacccagtgcgcgtgcgcggccactaccgcgcgccctggggagcgcacaagcgcgggcgcgcagggcgcaccactgtggacgacgccattgactccgtagtggagcaggcgcgccactacacacccggcgcgccgtccgcccccgccgtgtccaccgtggacgaggcgatcgaaagcgtggtacagggcgcgcggcactatgccaaccttaaaaatcgccgccgtcgcgtggcccgccgccatcgccggagaccccgggccaccgccgccgcgcgccttgctaaggctctactcaggcgcgccaggcgaactggccgccgggccgccatgagggccgcacggcgggctgccgccagtgcggccgccgcggccccacgggcacgaaggcgcgcggccgctgccgccgccgccgccatttccagcttggcctcaacgcggcgcggtaacatatactgggtgcgcgactcgataaccggcacgcgggtacccgtgcgctttcgccccccgcggaattagcacaagacaacatacacactgagtctcctgctgttgtgtatcccagcggcgaccgtcagcagcggcgacatgtccaagcgcaaaattaaagaagagatgctccaggtcatcgcgccggagatctatgggcccccgaagaaggaggaggatgattacaagccccgcaagctaaagcgggtcaaaaagaaaaagaaagatgatgatgatgacgaggcggtggagtttgtccgccgcatggcacccaggcgccccgtgcagtggaagggtcggcgcgtgcagcgcgttttgcgccccggcaccgcggtggtcttcacgcccggcgagcgctccacgcgcactttcaagcgggtgtacgatgaggtgtacggcgacgaggacctgttggagcaggccaaccagcgctttggggagtttgcatatgggaaacggccccgcgagagtctaaaagaggacctgctggcgctaccgctggacgagggcaatcccaccccgagtctgaagccggtgaccctgcaacaggtgctgcctttgagcgcgcccagcgagcataagcgagggttgaagcgcgagggcggggacctggcgcccaccgtgcagttgatggtgcccaagcggcagaagctggaggacgtgctggagaaaatgaaagtagagcccgggatccagcccgagatcaaggtccgccccatcaagcaggtggcgcccggcgtgggagtccagaccgtggacgttaggattcccacggaggagatggaaacccaaaccgccactccctcttcagcggccagcgccaccaccggcaccgcttcggtagaggtgcagacggacccctggctacccgccgccgctgtcgccgccgccgccgccccccgttctcgcgggcgcaagagaaattatccagtggccagcgcgctcatgccccagtacgcactgcatccatccatcgcgcccacccccggctaccgcgggtattcgtaccgcccgcgcagatcggccggcactcgcggccgccgccgccgtgcgaccacaaccagccgccgccgtcgccgccgccgccagccagtgctgacccccgtgtctgtaaggaaggtggctcgctcggggagcacgctggtggtgcccagagcgcgctaccaccccagcatcgtttaaagccggtctctgtatggttcttgcagatatggccctcacttgtcgcctccgcttcccggtgccgggataccgaggaagaactcaccgccgcagaggcatggcgggcagcggtctccgcggcggccgtcgccatcgccggcgcgcaaaaagcaggcgcatgcgcggcggtgtgctgcctctgctaatcccgctaatcgccgcggcgatcggtgccgtacccgggatcgcctccgtggccctgcaggcgtcccagaaacgttgactcttgcaaccttgcaagcttgcatttttttggaggaaaaataaaaaagtctagactctcacgctcgcttggtcctgtgactattttgtagaaaaaagatggaagacatcaactttgcgtcgctggccccgcgtcatggctcgcgcccgttcatgggagactggacagatatcggcaccagcagtatgagcggtggcgccttcagctggggcagtctgtggagcggccttaaaaattttggttccaccattaaaaactatggcaacaaagcgtggaacagcagcacgggccagatgctaagagacaagttgaaagagcagaacttccaggagaaggtggcgcagggcctggcctctggcatcagcggggtggtggacatagctaaccaggccgtgcagaaaaagataaacagtcatctggacccccgccctcaggtggaggaaacgcctccagccatggagacggtgtttcccgagggcaaaggcgaaaagcgcccgcggcccgacagggaagagaccctggtgtcacacaccgaggagccgccctcttacgaggaggcactcaaggccggcctgcccaccactcgccccgtagctcccatggccacaggtgtggtgggccataaacaacacacccccgcaacactagatctgcccccgccgtccgagccgccgcgtcagccaaagacggcgacggtgcccgctccctccacttccgccgccaacagagtgtccctgcgccgcactacgggcgcccctcggggaccgcgactgagcggcaactggcagagcacactgaacagcattgtgggcctgggagtgaaaagtgtgaagcgccgccgttgctactgaatgagcaagctagctaacgtgttatatgtgtgtatgcgtcctatgtcgccgccagaggagctgttgagccgcccgcgccgtctgcactccagcgaatttcaagatggcgaccccttcgatgatgccacagtggtcgtacatgcacatctcgggccaggacgcctcggagtacctgagccccgggctggtgcagttcgcccgcgccaccgacagctacttcagcctaagtaacaaatttaggaaccctacggtggcacccacccacgatgtgaccacggaccggtcgcagcgcctgacgctgcggtttatccccgtggatcgggaggacactgcctactcttacaaggcgcgcttcacgctagccgtgggcgacaaccgcgtgctggacatggcctccacctactttgatatccggggtgtgctggacaggggtcccacctttaagccctactcgggcactgcctacaactccctggctcctaaaggcgctcccaattcttgcgagtgggatgaaaaaactaatactgctgaagcagccattgaaaatgaagaagagctggcggatgagccagaagagcaagcagaagaggctataaaaaccaatgtgtttgcccaggcgccatattctggcaatgcaatttccaaagaaggaatacaagtaggcatagaaggcattggagagcaagtaaaagccgtatacgcagacaaaacctaccagccggaacctcaggttggagaaactcaatggaatgagactgaaataaatcatggagcaggaagggtgctgaagaagaccactcccatgaagccttgctatggttcttatgctaaacctactaatgaatatggaggccagggcatccttgtagaaaaaaatggcaaaatggaaagccaggtggaaacacagttttttgctcttgacggtgaaaatgataatagtccaaaagtggtgttgtatagcgaagatgtaaacttggatactcctgacacacacctatcatacaaacctagcgcccaagatgtaaactctaaagaaatgttgggccaacaggccatgcccaacaggccaaatcttattgcttttagggacaactttattggacttatgtactacaacagcactggcaacatgggagtgctggcaggacaggcctcccaactaaatgccgtggtagacttgcaagacagaaacacagagttgtcataccagctgatgcttgattccattggagacagatcaagatattttgccatgtggaaccaggcggttgatagttacgatccagatgttagaattattgaaaaccatggcacagaggatgaacttccaaactactgttttcctttgggaggaatatttaatactcagagttttaaaaaggtaaaacctggaacggataacggatgggaaacagatgatgacttttcagataaaaatgaaataagagttggcaacaactttgccatggagatcaatatccaggcaaacctgtggagaagcttcttgtattccaatgtggctctctacctgccagataagatgaagtactctccaaccaacatagacatttccaccaacactaacacctatgactacatgaacaaaagagtggcgcctccaggcctggtggactgctatgtcaatctgggggccaggtggtcccttgatgtaatggataacatgaacccctttaaccaccaccgcaatgcgggcctgcgataccgttccatgcttctgggtaacggccgctacgtgcccttccacatccaggtgccccaaaagttctttgccatcaaaagccttctactcttgcctggctcgtacacctacgaatggaatttcagaaaggatgtgaacatggtcctacagagctctctgggcaacgaccttagggtggatggggccagcatcaagtttgacagcatcaccctttatgctacctttttccccatggcccacaacaccgcttccacgcttgaggccatgctcagaaacgacaccaacgaccagtccttcaatgactacctctctggggccaacatgctctaccccatccccgccaacgctaccaacgtgcccatctccattccctctcgcaactgggccgccttcagaggctgggcatttacccgccttaagaccaaggagaccccctccctgggctcgggttttgacccctactttgtctactcgggatccatcccctacctggatggcaccttctacctcaaccacacttttaagaagatatccatcatgtatgactcctctgtcagctggccgggcaacgaccgcctgctcacccccaatgagttcgaggtcaagcgcgccgtggacggcgagggctacaacgtggcccagtgcaacatgaccaaggactggttcctggtgcagatgctggccaactacaacataggctaccagggcttctacatcccagagagctacaaggacaggatgtactccttcttcagaaatttccaacccatgagcaggcaggtggtggacgagaccaaatacaaggactatcaggccgttggcatcactcaccagcacaacaactcgggattcgtgggctacctggcacccaccatgcgcgagggacaggcctaccccgccaacttcccctaccccttgataggcaagaccgcggtcgacagcgtcacccagaaaaagttcctctgcgaccgcaccctctggcgcatccccttttctagcaacttcatgtccatgggcgcgctcacggacctgggccagaacctgctctatgccaactccgcccatgcgctggacatgacttttgaggtggaccccatggacgagcccacccttctctatattgtgtttgaagtgttcgacgtggtcagagtgcaccagccgcaccgcggtgtcatcgagaccgtgtacctgcgcacgcccttctcggccggcaacgccaccacctaaggagacagcgccgccgcctgcatgacgggttccaccgagcaagagctcagggccatcgccagagacctgggatgcggaccctattttttgggcacctatgacaaacgcttcccgggcttcatctcccgagacaagctcgcctgcgccatcgtcaacacggccgcgcgcgagaccgggggcgtgcactggctggcctttggctgggacccgcgctccaaaacttgctacctctttgacccttttggcttctccgatcagcgcctcaagcagatctatgagtttgagtacgaggggctgctgcgccgcagcgcgcttgcctcctcgcccgaccgctgcatcacccttgagaagtccaccgagaccgtgcaggggccccactcggccgcctgcggtctcttctgctgcatgtttttgcacgcctttgtgcgctggccccagagtcccatggatcgcaaccccaccatgaacttgctcaagggagtgcccaacgccatgctccagagcccccaggtccagcccaccctgcgccacaaccaggaacagctctaccgcttcctggagcgccactccccctacttccgcagtcacagcgcgcgcatccggggggccacctctttctgccacttgcaagaaaacatgcaagacggaaaatgatgtacagctcgctttttaataaatgtaaagactgtgcactttatttatacacgggctctttctggttatttattcaacaccgccgtcgccatctagaaatcgaaagggttctgccgcgcgtcgccgtgcgccacgggcagagacacgttgcgatactggaagcggctcgcccacttgaactcgggcaccaccatgcggggcagtggttcctcggggaagttctcgccccacagggtgcgggtcagctgcagcgcgctcaggaggtcgggagccgagatcttgaagtcgcagttggggccggaaccctgcgcgcgcgagttgcggtacacggggttgcagcactggaacaccagcagggccggattatgcacgctggccagcaggctctcgtcgctgatcatgtcgctgtccagatcctccgcgttgctcagggcgaatggggtcatcttgcagacctgcctgcccaggaaaggcggcagcccgggcttgccgttgcagtcgcagcgcaggggcatcagcaggtgcccgcggcccgactgcgcctgcgggtacagcgcgcgcatgaaggcttcgatctgcctgaaagccacctgcgccttggctccctccgaaaagaacatcccacaggacttgctggagaactggttcgcgggacagctggcatcgtgcaggcagcagcgcgcgtcggtgttggcgatctgcaccacgttgcgaccccaccggttcttcactatcttggccttggaagcctgctccttcagcgcgcgctggccgttctcgctggtcacatccatctctatcacctgctccttgttgatcatgtttgtcccgtgcagacacttcaggtcgccctccgtctgggtgcagcggtgctcccacagcgcgcaaccggtgggctcccaattcttgtgggtcacccccgcgtaggcctgcaggtaggcctgcaagaagcgccccatcatggccacgaaggtcttctggctcgtaaaggtcagctgcaggccgcgatgctcttcgttcagccaggtcttgcagatggcggccagcgcctcggtctgctcgggcagcatcctaaaatttgtcttcaggtcgttatccacgtggtacttgtccatcatggcgcgcgccgcctccatgcccttctcccaggcggacaccatgggcaggcttagggggtttatcacttccaccggcgaggacaccgtactttcgatttcttcttcctccccctcttcccggcgcgcgcccacgctgctgcgcgctctcaccgcctgcaccaaggggtcgtcttcaggcaagcgccgcaccgagcgcttgccgcccttgacctgcttaatcagcaccggcgggttgctgaagcccaccatggtcagcgccgcctgctcttcttcgtcttcgctgtctaccactatctctggggaagggcttctccgctctgcggcggtgcgcttcttttttttcttgggagcagccgtgacggagtccgccacggcgacggaggtcgagggcgtggggctgggggtgcgcggtaccagggcctcgtcgccctcggactcttcctctgactccaggcggcggcggagtcgcttctttgggggcgcgcgcgtcagcggcggcggagacggggacggggacggggacgggacgccctccacagggggtggtcttcgcgcagacccgcggccgcgctcgggggtcctctcgagctggtcttggtctcgactggccattgtatcctcctcctcctaggcagagagacataaggagtctatcatgcaagtcgagaaggaggagagcttaaccaccccctctgacaccgccgatgcgcccgccgtcgccgtcgcccccgctgccgccgacgcgcccgccacaccgagcgacacccccgcggacccccccgccgacgcacccctgttcgaggaagcggccgtggagcaggacccgggctttgtctcggcagaggaggatttgcgagaggaggagaataaggagaagaagccctcagtgccaaaagatgataaagagcaagacgagcacgacgcagatgcacaccagggtgaagtcgggcggggggacggagggcatggcggcgccgactacctagacgaagggaacgacgtgctcttgaagcacctgcatcgtcagtgcgccatcgtttgcgacgctctgcaggagcgcagcgaagtgcccctcagcgtggcggaggtcagccacgcctacgagctcagcctcttctccccccgggtgcccccccgccgccgcgaaaacggcacatgcgagcccaacccgcgcctcaacttctaccccgccttcgtggtgcccgaggtcctggccacctatcacatcttctttcaaaattgcaagatccccctctcgtgccgcgccaaccgtagccgcgccgataagatgctggccctgcgccagggcgaccacatacctgatatcgccgctttggaagatgtgccaaagatctttgagggtctgggtcgcaacgagaagcgggcagcaaactctctgcaacaggaaaacagcgaaaatgagagtcacaccggggtactggtggagctcgagggcgacaacgcccgcctggcggtggtcaagcgcagcatcgaggtcacccactttgcctaccccgcgctaaacctgccccccaaagtcatgaacgcggccatggacgggctgatcatgcgccgcggccggcccctcgctccagatgcaaacttgcatgaggagaccgaggacggccagcccgtggtcagcgacgagcagctggcgcgctggctggagaccgcggaccccgccgaactggaggagcggcgcaagatgatgatggccgcggtgctggtcaccgtagagctggagtgtctgcagcgcttcttcggcgaccccgagatgcagagaaaggtcgaggagaccctgcactacaccttccgccagggctacgtgcgccaggcttgcaagatctccaacgtggagctcagcaacctggtgtcctacctgggcatcttgcatgagaaccgcctcgggcagagcgtgctgcactccaccctgcgcggggaggcgcgccgcgactacgtgcgcgactgcgtttacctcttcctctgctacacctggcagacggccatgggggtctggcagcagtgtctggaggagcgcaacctcaaagagctggagaagctcctgcagcgcgcgctcaaagacctctggacgggctacaacgagcgctcggtggccgccgcgctggccgacctcatcttccccgagcgcctgctcaaaaccctccagcaggggctgcccgacttcaccagccaaagcatgttgcaaaacttcaggaactttatcctggagcgttctggcatcctacccgccacctgctgcgccctgcccagcgactttgtccccctcgtgtaccgcgagtgccccccgccgctgtggggtcactgctacctgttccaactggccaactacctgtcctaccacgcggacctcatggaggactccagcggcgaggggctcatggagtgccactgccgctgcaacctctgcacgccccaccgctccctggtctgcaacacccaactgctcagcgagagtcagattatcggtaccttcgagctacagggtccgtcctcctcagacgagaagtccgcggctccggggctaaaactcactccggggctgtggacttccgcctacctgcgcaaatttgtacctgaagactaccacgcccacgagatcaggttttacgaggaccaatcccgcccgcccaaggcggagctgaccgcctgcgtcatcacccagggcgagatcctaggccaattgcaagccatccaaaaagcccgccaagattttttgctgaagaagggtcggggggtgtatctggacccccagtcgggtgaggagctcaacccggttcccccgctgccgccgccgcgggaccttgcttcccaggataagcatcgccatggctcccagaaagaagcagcagcggccgccactgccgccaccccacatgctggaggaagaggaggaatactgggacagtcaggcagaggaggtttcggacgaggaggagccggagacggagatggaagagtgggaggaggacagcttagacgaggaggcttccgaagccgaagaggcagacgcaacaccgtcaccctcggccgcagccccctcgcaggcgcccccgaagtccgctcccagcatcagcagcaacagcagcgctataacctccgctcctccaccgccgcgacccacggccgaccgcagacccaaccgtagatgggacaccaccggaaccggggccggtaagtcctccgggagaggcaagcaagcgcagcgccaaggctaccgctcgtggcgcgctcacaagaacgccatagtcgcttgcttgcaagactgcggggggaacatctccttcgcccgccgcttcctgctcttccaccacggtgtggccttcccccgtaacgtcctgcattactaccgtcatctctacagcccctactgcggcggcagtgagccagagacggtcggcggcggcggcgcccgtttcggcgcctaggaagacccagggcaagacttcagccaagaaactcgcggcggccgcggcgaacgcggtcgcgggggccctgcgcctgacggtgaacgaacccctgtcgacccgcgaactgaggaaccgaatcttccccactctctatgccatcttccagcagagcagagggcaggatcaggaactgaaagtaaaaaacaggtctctgcgctccctcacccgcagctgtctgtatcacaagagcgaagaccagcttcggcgcacgctggaggacgctgaggcactcttcagcaaatactgcgcgctcactcttaaggactagctccgcgcccttctcgaatttaggcgggaacgcctacgtcatcgcagcgccgccgtcatgagcaaggacattcccacgccatacatgtggagctatcagccgcagatgggactcgcggcgggcgcctcccaagactactccacccgcatgaactggctcagtgccggcccacacatgatctcacaggttaatgatatccgcacccatcgaaaccaaatattggtggagcaggcggcgattaccaccacgccccgcaataatcccaaccccagggagtggcccgcgtccctggtgtatcaggaaattcccggccccaccaccgtactacttccgcgtgattcccaggccgaagtccaaatgactaactcaggggcgcagctcgcgggcggctgtcgtcacagggtgcggccccctcgccagggtataactcacctggagatccgaggcagaggtattcagctcaacgacgagtcggtgagctcctcgctcggtctcagacctgacgggaccttccagatagccggagccggccgatcttccttcacgccccgccaggcgtacctgactctgcagagctcgtcctcggcgccgcgctcgggcggcatcgggactctccagttcgtgcaggagtttgtgccctcggtctacttcaaccccttctccggctctcccggtcgctacccggaccagttcatctcgaactttgacgccgcgagggactcggtggacggctacgactgaatgtcgggtggacccggtgcagagcaacttcgcctgaagcacctcgaccactgccgccgccctcagtgctttgcccgctgtcagaccggtgagttccagtacttttccctgcccgactcgcacccggacggcccggcgcacggggtgcgctttttcatcccgagtcaggtgcgctctaccctaatcagggagtttaccgcccgtcccctactggcggagttggaaaaggggccttctatcctaaccattgcctgcatctgctctaaccctggattgcaccaagatctttgctgtcatttgtgtgctgagtataataaaggctgagatcagaatctactcgggctcctgtcgccatcctgtcaacgccaccgtccaagcccggcccgatcagcccgaggtgaacctcacctgcggtctgcaccggcgcctgagaaaatacctagcttggtactacaacagcactccctttgtggtttacaacagctttgaccaggacggggtctcactgagggataacctctcgaacctgagctactccatcaggaagaacagcaccctcgagctacttcctccttacctgcccgggacttaccagtgtgtcaccggtccctgcacccacacccacctgttgatcgtaaacgactctcttccgagaacagacctcaataactcctcttcgcagttccccagaacaggaggtgagctcaggaaaccccgggtaaagaagggtggacaagagttaacacttgtggggtttctggtgtatgtgacgctggtggtggctcttttgattaaggcttttccttccatgtctgaactctccctcttcttttatgaacaactcgactagtgctaacgggaccctacccaacgaatcgggattgaatatcggtaaccaggttgcagtttcacttttgattaccttcatagtcctcttcctgctagtgctgtcgcttctgtgcctgcggatcgggggctgctgcatccacgtttatatctggtgctggctgtttagaaggttcggagaccatcgcaggtagaataaacatgctgctgcttaccctctttgtcctggcgctggccgccagctgccaagccttttccgaggctgattttatagaaccccagtgcaatatcacttataaatctgaatataacctctgcactatcctaattaaatgcgttactcaacacgatgaggtaactgttagatacaaagatcaatcaaaaagagacgcactttacagcagctggcaaccaggagatgaacaaaaatacaatgtgaccgtcttccagggcaaactctccaaaacttacaattacactttcccattcgaggagatgtgtgagtttgtcatgttcatgtcaaagcagtacaagatgtggcctccgactccccagggctgtgtggaaaatccaggctctttctgcatgatctctctctgtgtaactgtgctggcactaatactcacgcttttgtatatcagatttaaatcaaggcaaagcttcatcgatgaaaagaaaatgccttaatcgcttttcacgcttgattgctaacaccgggtttttatccgcagaatgattggaatcaccctactaatcacctccctccttgcgattgcccatgggttggaacgaatcgaagtccctgtgggggccaatgttaccctggtggggcctgtcggcaatgctacattaatgtgggaaaaatatactaaaaatcaatgggtctcttactgcactaacaaaaacagccacaagcccagagccatctgcgatgggcaaaatttaaccttgattgatgttcaattgctggatgcgggctactattatgggcagctgggtacaatcgttaattactggagaccccacaaagattacatgcttcacgtagtaaagggtccccttagcagcccgaccactaccaccacctctaccacacccactaccaccactactcccatcaccagcactgccacccagcctcctcatagcagaacaaccacttttatcaattccaagtcccactccccccacattgccggcgggccctccgcctcaaactccgagaccaccgagatctgcttctgcaaatgctctgacgccattgcccaggatttggaagaccacgaggaagatgagcatgacttcgcagatgcatgccaggcatcaggggcagaagcactgccggtggccctcaaacagtatgcagactcccataccacccccgatcttccaccgccttcccagaagccaagtttcctgggggaaaatgaaacactgcctctctccatacttgctttgacatctgttgctattctgactgctctgctggtgctcctatgctctatatgctacctgatctgctgcaggaagaaaaaatctcacggccatgctcaccagccgcttatgcacttcccttaccctccagagttgggcgaccacaaactttaagtctgcagtagctatctgcccatcccttgtcagtcgacagcgatgagccccactaatctaacggcctctggacttacaacattgtctcttaatgagaccaccgctcctcaagacctgtacgatggtgtctccgcgctggttaaccagtgggatcacctgggcatatggtggctcctcataggagcagtgaccctgtgcctaatcctggtctggataatctgctgcatcaaaagcagaagacccaggcggcggcccatctacaggcccttcgtcatcacacctgaagatgatgatggcaccacgtccaggctgcagagcctaaagcagctactcttctcttttacagcatggtaaattgaacatgcctcgcattttcatctacttgtttcttcttccactctttttgggctcttctacattggcagctgtgtcccacatcgaggtagactgcatctcgcccttctcagtctacttactcttcggctttgtcatttgcaactttgtctgcagcgttatcactgtagtgatctgcttcatacagtgcatcgactacgtctgcgtacgggtggcctattttagacaccacccccagtatcgcaacagggacatagcggctctcctaagacttgtttaaatcatgcccaaattaactgtgattgctcttctgattatctgctgcgtcctagccgcgattgggactcagcctactaccaccaccaccagcgctcccagaaagagacatgtttcctgcagcttcaaacgtccctggaatataccccaatgctttactgatgaacctgaaatctctttggcttggtacttcagcgtcaccgcccttctcatcttctgcagtacggttattgcccttgccatttacccttcccttgacctgggctggaatgctgtcaactctatggaatatcccaccttcccagaaccagacctgccagacctggttgttctaaacgcgtttcctcctcctcccgttcaaaatcagtttcgccctccgtccccgacgcccactgaggtcagctactttaatctaacaggcggagatgactgaaaacctagacctagaaatggacggcctctgcagcgaacaacgcatactagagaggcgccggcaaaaagcagagctcgagcgtcttaaacaagagctccaagacgcggtggccatacaccagtgcaaaaaaggtgtcttctgtctagtgaaacaggccacgctcacctatgaaaaaacaggtgacacccaccgcctaggatacaagctgcccacacaacgccagaagttcgcccttatgataggcgaacaacccatcaccgtcacccagcactctgtggagacagaaggctgcatacacgctccctgcaggggcgctgactgtctctacaccttgatcaaaaccctctgcggccttagagacctcatccctttcaattgatcataactgtaatcaataaaaaatcacttacttgaaatctgatagcaagcctctgtccaattttttcagcaacacttccttcccctcctcccaactctggtactctaggcgcctcctagctgcaaacttcctccacagtctgaagggaatgtcagattcctcctcctgtccctccgcacccacgatcttcatgttgttgcagatgaaacgcgcgagatcgtctgacgagaccttcaaccccgtgtacccctacgataccgagatcgctccgacttctgtcccttttcccacccctccctttgtgtcccccgcaggaatgcaagaaaacccccctggagtgctatccctacgccttgcagaacccttgaccacctccaatggagcgctgaccctaaaaatggggggtggtttgaccctggacgaagaaggaaagcttacttcccaaaatattaccagtgttgatcctcctcttaaaaaaacaaaaaacaatatcagtctgcagactgcctccccccttgccgtcagctcgggagccctcacacttttcgctactcctcccctggcagttaatgacaataacctaactgtgcagtctcaggctccccttacactggaaaactcaaaactaagtctggccaccaaaggccccctaaccgtttctgaaggaaaacttgccctagaaacagaggctcccttgcatgcaagcgacagcagtagcctaggccttagtgtaacggccccactgagcattagcagcgacagcctaggactagacttgcaagcgcccattatttctgaaaatggaaaactgggcctaagagtaacaggtcccctaactgtggccagcagtattgatgctttgacagtagccacaggcagcggtattggacttgatagcaacacgcgcctacaggcaaaattggtcgcgcccctaggctttgacaccaatggcaacattaagctcagcacttcgggcggcatgagactgaacaatggcacacttatactagatgtaaactacccatttgaggctcaaggtcaacttagtctaagagtgggttcgggtccactgtatgtagactccaacacacataacctaaccgctagatgccttagagggctatacataacgtcatctaataaccaaaccggcctggaggccaacataaaacttacaaaaggacttgtgtttgatggaaatgccatagcagttaatgttagcaaagggctagaatacagtaccactgaaacagcgcagggtgtaaatcccatacagactaaaataggtttgggcatggaatatgataccaatggagccataaagccaagactaggctctggtttgagctttgataattcaggagctattgtagtgggaaacaaaaatgatgacactcttactctgtggactacaccagacccatctcccaactgtcagattaactcggaaaaagatgctaaactaaccttggtactaaccaagtgcggtagtcaaattgtaggcacagtatctgcctttgctcttaaaggcagccttgccccaattaatggcacagtgagctcagttagtatattcctaagatttaatgaaaatggggtactgatgagcaactcatcgttggaaagccaatactggaattacaggaatggaaattcaactaatgccacaccatatacaaatgcactaggttttatgcctaacctggcagcttatcccaaaggccaggcaacgactgcaaaaagcagcatcattagccaggtttacatgaatggtgacacttccaaacctatgatatttacaataacttttaatgggcttgaaacagaggaaactcaggtcagtacatattccatgacattttcatggaggtggacaaatggagactacgtggggcactattttaaaacaaactcctttactttctcctacattgcccaagaataaagaaagcacagagatgcttgtttttgatttcaaaattgtgtgcttttatttatttcaagcttacagtatttccagtagtcattcgaatagagcttaattaaactgcatgagaacccttccacatagcttaaattagcaccagtgcaaatggagaaaaatcaacatacctttttatccagatatcagagaactctagtggtcagttttcccccaccctcccagctcacagaatacacagtcctttccccccggctggctttaaacaacactatctcattggtaacagacatattcttaggtgtaataatccacacggtctcttggcgggccaaacgctggtcggtgatgttaataaactccccaggcagctctttcaagttcacgtcgctgtccaactgctgaagcgctcgcggctccgactgcgcctctagcggaggcaacggcaacacccgatccttgatctataaaggagtagagtcataatcccccataagaatagggcggtgatgcagcaacaaggcgcgcagcaactcctgccgccgcctctccgtacggcaggaatgcaacggcgtggtggtctcctccgcgataatccgcaccgctcgcagcatcagcatcctcgtcctccgggcacagcagcgcatcctgatctcactgagatcggcgcagtaagtgcagcacaaaaccaagatgttatttaagatcccacagtgcaaagcgctgtacccaaagctcatggcgggaaggacagcccccacgtgaccatcataccagatcctcaggtaaatcaaatgacgacctctcataaacacgctggacatgtacatcacctccttgggcatgtgctgattcaccacctctcgataccacaagcatcgctgattaattaaagacccctcgagcaccatcctgaaccaggaagccagcacctgaccccccgccaggcactgcagggaccccggtgaatcgcagtggcagtgaagactccagcgctcgtagccgtgaaccatagagctggtcattatatccaaattggcacaacacagacacactttcatacactttttcatgattagcagctcctctctagtcaggaccatatcccaaggaatcacccactcttgaatcaaggtaaatcccacacagcagggcaggcctctcacataactcacgttatgcatagtgagcgtgtcgcaatctggaaataccggatgatcttccatcaccgaagcccgggtctccgtctcaaagggaggtaaacggtccctcgtgtagggacagtggcgggataatcgagatcgtgttgaacgtagagtcatgccaaagggaacagcggacgtactcatatttcctccagcagaaccaagtgcgcgcgtggcagctatccctgcgtcttctgtctcgccgcctgccccgttcggtgtagtagttgtaatacagccactccctgagaccgtcaaggcgctccctggcgtccggatctatgacaacaccgtcctgcagcgccgccctgatgacatccaccaccgtagagtatgccaagcccagccaggaaatgcattcactttgacagcgagagataggaggagcggggagagatggaagaaccatgatagtaaagagaacttttattccaatcgatcttctaagatatcaaagtggagatctataagatgacactggtctcctccgctgagtcgatcaaaaataacagctaaaccacaaacaacacgattggtcaaatgctccacaagggcctgcagcataaaattgcctcggaactccaccgcaagcataacatcaaagccaccgcctctatcgtgatcaagaataaaaaccccacagctatccaccagacccatatagttttcatctctccatcgtgaaaaaagatttacaagctcctcctttaaatcacctccaaccaattgaaaaagttgaaccagaccgccctccaccttcattttcagcaagcgtatcatgattgcaaaaattcaggctcctcagacacctgtataagattgagaagcggaacgttaacatcgatgtttcgctcgcgtaaatcacgcctcagtgcaagcataatataatcccacaggtcggagcggatcagcgaggacacctccccgccaggaaccaactcaacggagcctatgctgattataatacgcatattcggagctatgctaaccagcacggcccccaaataggcgtactgcataggcggcgacaaaaagtgaacagtttgggttaaaaaatcaggcaaacactcgcgcaaaaaagcaagaacatcataaccatgctcatgcaaatagatgcaagtaagctcaggaacgaccacagaaaaatgcacaatttttctctcaaacatgactgcgagccctgcaaaaaataaaaaagaaacattacacaagagtagcctgtcttacgatgggatagactactctaaccaacataagacgggccacaacatcgcccgcgtggccataaaaaaaattgtccgtgtgattaaaaagaagcacagatagctggccagtcatatccggagtcatcacgtgtgaacccgtgtagacccccgggttggacacatcggccaaagaaagaaagcggccaatgtacccaggaggaattataacactaagacgaagatacaacagaataaccccatgagggggaataacaaagttagtaggtgaataaaaacgataaacacccgaaactccctcctgcgtaggcaaaatagcaccctccccttccaaaacaacatatagcgcttccacagcagccatgacaaaagactcaaaacactcaaaagactcagtcttaccaggaaaataaaagcactctcacagcaccagcactaatcagagtgtgaaaagggccaagtgccgaacgagtatatataggaataaaaaatgacgtaaatgtgtaaaggtcagaaaacgcccagaaaaatacacagaccaacgcccgaaacgaaaacccgcgaaaaaatacccagaacttcctcaacaaccgccacttccgctttctcacgatacgtcacttccgcaagaaaagcaaaactacatttcccacatgtgtaaaaacgaaaccccgccccttctaaccgcccacaacttacatcatcaaaacgtaaagtcctacgtcacccgccccgcctctccccgcccacctcattatcatattggccacaatccaaaataaggtatattattgatgatg

SEQ ID NO: 52 - DNA, 37074 bp, Gorilla beringei graueri
catcatcaataatataccttattttggattgtggccaatatgataatgaggtgggcggggagaggcggggcgggtgacgtaggacgcgcgagtagggttgggaggtgtggcggaagtgtggcatttgcaagtgggaggagctcacatgcaagcttccgtcgcggaaaatgtgacgtttttgatgagcgccgcctacctccggaagtgccaattttcgcgcgcttttcaccggatatcgtagtaattttgggcgggaccatgtaagatttggccattttcgcgcgaaaagtgaaacggggaagtgaaaactgaataatagggcgttagtcatagcgcgtaatatttaccgagggccgagggactttgaccgattacgtggaggactcgcccaggtgttttttacgtgaatttccgcgttccgggtcaaagtctccgtttttattgtcaccgtcatttgacgcggagggtatttaaacccgctgcgctcctcaagaggccactcttgagtgccagcgagaagagttttctcctctgctccgcttcggtgatcgaaaaatgagacacatagcctgcactccgggtcttttgtccggtcgggcggcggccgagcttttggacgctttgatcaatgatgtcctgagcgatgattttccgtctactacccactttagcccacctactcttcacgaactgtacgatctggatgtactggtggatgtgaacgatcccaacgaggaggcggtttctgcgttttttcccgagtctgcgctgttggccgctcaggagggatttgacctacacactccgccgcctattttagagtctccgctgccggagcccagtggtataccttatatgcctgaactgcttcccgaagtggtagacctgacctgccacgagcctggctttccgcccagcgacgatgatggtgagccttttgttttagactttgctgagatacctgggcacggttgcaggtcttgtgcatatcatcagagggttaccggagaccccgaggttaagtgttcgctgtgctatatgaggatgacctcttcctttatctacagtaagtttttgtctaggtgggcttttgggtaggtgggttttgtgtcagaacaggtgtaaacgttgcttgtgttttttgtacctgtaggtccggtgtccgagccagacccggagcccgaccgcgatcccgagccggatcccgagcctcctcgcaggacaaggaaactaccttccattctgtgcaagtctcagacacctgtaaggaccagcgaggcagacagcaccgactctggcacttctacctctccccctgaaattcacccagtggttcctctgggtatacataaacctgttgctgttagagtttgcgggcgacgccctgcagtacagtgcattgaggacttgcttcacgatcccgaggaacctttggacttgagccttaaacgccctaggcaataaaccccacctaagtaataaaccccacctaagtaataaaccctgccgcccttggttattgagatgacgcccaatgtttgcttttgaatgacttcatgtgtgtaataaaagtgagtgtgatcataggtctcttgtttgtctgggcggggcttaagggtatataagtttctcggggctaaacttggttacacttgaccccaatggaggcgtgggggtgcttggaggagtttgcggacgtgcgccgtttgctggacgagagctctaaccatacctatactatttggaggtatctgtggggctctactcaggccaagttggtctccagaattaagcaggattacaagtgcgattttgaagagctttttagttcctgcggtgagcttttgcaatccttgaatctgggccatcaggctattttccaggaaaaggttctctcgactttggatttttccactcccgggcgcaccgccgcttgtgtggcttttgtgtcttttgtgcaagataaatggagcgaggagacccacctgagtcacggctacgtactggatttcatggcgatggctctttggagggctcacaacaaatggaagattcagaaggaactgtacggttccgccctacgtcgtccacttttgtcgcgacaggggctgaggtttcccgaccatcggcagcatcagaatctggaagacgagtcggaggagcgagcggaggagaagatcagcttgagagccggcctggaccctcctcaggaggaatgaatctcccgcaggtggttgacctgtttccagaactgagacgggtcctgactatcagggaggatggtcagtttgtgaagaagtttaagagggatcggggtgagggagatgatgaggcggctagcaatttagcttttagtctgatgactcgccaccgaccggaatgtattacctatcagcagattaaggagagttgtgccaacgagctggatcttttgggtcagaagtatagcatagaacagcttaccacttactggcttcagcctggggatgattgggaagaggcgatcagggtgtatgcaaaggtggccctgcggcccgattgcaagtataagattactaagttggttaatattagaaactgctgctatatttctgggaacggggccgaagtggagatagatactcaggacagggtggcttttaggtgttgcatgataaacatgtggcccgggatactggggatggatggggtggtgttcatgaatgtgaggtttacgggccccaactttaatggcacggtgttcatgggcaacaccaacttgctcctgcatggtgcgagtttctatgggtttaataacacctgtatagaggcctggaccgatgtaaaggttcgaggttgttccttttatagctgttggaaggcggtggtgtgtcgccctaaaagcaggggttctgtgaaaaaatgcttgtttgaaaggtgcaccttaggcatcctctctgagggcaactccagggtgcgccataatgtggcttcgaactgcggttgcttcatgcaagtgaagggggtgagcgttatcaagcataactcggtgtgtggaaactgcgaggatcgcgcctcccagatgctgacctgctttgatggtaactgtcacctgttgaagaccattcatataagcagccaccccagaaaggcctggcccgtgtttgagcataacatcctgacccgctgctccttgcatctgggggtcaggaggggtatgttcctgccttaccagtgtaactttagccacactaaaatcctgctggaacccgagtgtatgaccaaggtcagcctaaatggcgtgtttgatgcgactctgagaatctggaaggtgctgaggtatgatgagaccaggaccaggtgccgaccctgcgagtgcggcggcaagcacatgagaaatcagcctgtgatgttggatgtgaccgaggagcttaggcctgaccatctggtgctggcctgcaccagggccgagtttgggtctagcgatgaggataccgattgaggtgggtaaggtgggcgtggctagaagggtggggcgtgtataaattgggggtctaagggtctctctgttttgtcttgcaacagccgccgccatgagcgacaccggcaacagctttgatggaagcatctttagcccctatctgacagtgcgcatgcctcactgggctggagtgcgtcagaatgtgatgggttccaacgtggatggacgccccgttctgccttcaaattcgtctacaatggcctacgcgaccgtgggaggaactccgctggacgccgcgacctccgccgccgcctccgccgccgccgcgaccgcgcgcagcatggctacggacctttacagctctttggtggcgagcggcgcggcctctcgcgcgtctgctcgggatgagaaactgaccgctctgctgcttaaactggaagacttgacccgggagctggctcaactgacccagcaggtctccagcttgcgtgagagcagccttgcctccccctaatggcccataatataaataaaagccagtctgtttggattaagcaagtgtatgttctttatttaactctccgcgcgcggtaagcccgggaccagcggtctcggtcgtttagggtgcggtggattctttccaacacgtggtacaggtggctctggatgtttagatacatgggcatgagtccatccctggggtggaggtagcaccactgcagagcttcgtgctcgggggtggtgttgtatatgatccagtcgtagcaggagcgctgggcgtggtgctgaaaaatgtccttaagcaagaggcttatagctagggggaggcccttggtgtaagtgtttacaaatctgctcagttgggaggggtgcatccggggggatataatgtgcatcttggactggatttttaggttggctatgttcccacccagatcccttctgggattcatgttgtgcaggaccaccagcacggtatatccagtgcacttgggaaatttatcgtggagcttagacgggaatgcatggaagaacttggagacgcccttgtggcctcccagattttccatacattcgtccatgatgatggcaatgggcccgtgggaagctgcctgagcaaaaatgtttctgggatcgctcacatcgtagttatgttccagggtgaggtcatcataagacatctttacaaatcgggggcggagggtcccggactggggtatgatggtaccctcgggccccggggcgtagttcccctcacagatctgcatctcccaggctttcatttcagagggagggatcatatccacctgcggagcgatgaaaaacacagtttctggcgcaggggagattaactgggatgagagcaggtttctgagcagctgtgactttccacagccggtgggcccatatatcacgcctatcaccggctgcagctggtagttaagagagctgcagctgccgtcctcccggagcaggggggccacctcgttcagcatatccctgacgtggatgttctccctgaccaattccgccagaaggcgctcgccgcccagcgaaagcagctcttgcaaggaagcaaaatttttcagcggttttaggccgtcggccgtgggcatgtttttcagcgtctgggtcagcagttccagcctgtcccacagctcggtgatgtgctctacggcatctcgatccagcagatctcctcgtttcgcgggttggggcggctttcgctgtagggcaccagccgatgggcgtccagcggggccagagtcatgtccttccatgggcgcagggtcctcgtcagggtggtctgggtcacggtgaaggggtgcgctccgggttgggcgctggccagggtgcgcttgaggctggttctgctggtgctgaatcgctgccgctcttcgccctgcgcgtcggccaggtagcatttgaccatggtctcgtagtcgagaccctcggcggcgtgccccttggcgcggagctttcccttggaggtggcgccgcacgaggggcactgcaggctcttcagggcgtagagcttgggagcgagaaacacggactctggggagtaggcgtccgcgccgcaggaagcgcagaccgtctcgcattccaccagccaagtgagctccgggcggtcagggtcaaaaaccaggttgcccccatgctttttgatgcgtttcttacctcggctctccatgaggcggtgtcccttctcggtgacgaagaggctgtccgtgtccccgtagaccgacttcaggggcctgtcttccagcggagtgcctctgtcctcctcgtagagaaactctgaccactctgagacgaaggcccgcgtccaggccaggacgaaggaggccacgtgggaggggtagcggtcgttgtccactagcgggtccaccttctccagggtgtgcaggcacatgtccccctcctccgcgtccagaaaagtgattggcttgtaggtgtaggacacgtgaccgggggttcccgacgggggggtataaaagggggtgggcgccctttcatcttcactctcttccgcatcgctgtctgcgagagccagctgctggggtaagtattccctctcgaaggcgggcatgacctcagcgctcaggttgtcagtttctaaaaatgaggaggatttgatgttcacctgtcctgaggtgatacctttgagggtacctgggtccatctggtcagaaaacactatttttttgttgtcaagcttggtggcgaacgacccgtagagggcgttggagagcagcttggcgatggagcgcagggtctggtttttgtcgcggtcggctcgctccttggccgcgatgttgagttgcacgtactcgcgggccacgcacttccactcggggaagacggtggtgcgctcgtctgggatcaggcgcaccctccagcctcggttgtgcagggtgaccatgtcgacgctggtggcgacctcgccgcgcaggcgctcgttggtccagcagaggcggccgcccttgcgcgagcagaaggggggtagggggtccagctggtcctcgtttggggggtccgcgtcgatggtgaagaccccggggagcaagcgcgggtcaaagtagtcgatcttgcaagcttgcatgtccagagcccgctgccattcgcgggcggcgagcgcgcgctcgtaggggttgaggggcgggccccagggcatggggtgggtgagcgcggaggcgtacatgccgcagatgtcatacacgtacaggggttccctgaggatgccgaggtaggtggggtagcagcgccccccgcggatgctggcgcgcacgtagtcatagagctcgtgggagggggccagcatgttgggcccgaggttggtgcgctgggggcgctcggcgcggaaggcgatctgcctgaagatggcatgggagttggaggagatggtgggccgctggaagacgttgaagcttgcttcttgcaagcccaccgagtccctgacgaaggaggcgtaggactcgcgcagcttgtgcaccagctcggcggtgacctggacgtcgagcgcgcagtagtcgagggtctcgcggatgatgtcatacttatcctcccccttctttttccacagctcgcggttgaggacgaactcttcgcggtctttccagtactcttggaggggaaacccgtccgtgtccgaacggtaagagcctagcatgtagaactggttgacggcctggtaggggcaacagcccttctccacgggcagcgcgtaggcctgcgccgccttgcggagggaggtgtgggtgagggcgaaagtgtccctgaccatgactttgaggtattgatgtttgaagtctgtgtcatcgcagccgccctgttcccacagggtgtagtccgtgcgctttttggagcgcgggttgggcagggagaaggtgaggtcattgaagaggatcttccccgctcgaggcatgaagtttctggtgatgcgaaagggccctgggaccgaggagcggttgttgatgacctgggcggccaggacgatctcgtcaaagccgtttatgttgtggcccacgatgtagagctccaaaaagcggggctggcccttgatggaggggagctttttgagttcctcgtaggtgagctcctcgggcgattccaggccgtgctcctccagggcccagtcttgcaagtgagggttggccgccaggaaggatcgccagaggtcgcgggccatgagggtctgcaggcggtcgcggaaggttctgaactgtcgccccacggccatcttttcgggggtgatgcagtagaaggtgagggggtctttctcccaggggtcccatctgagctctcgggcgaggtcgcgcgcggcggcgaccagagcctcgtcgccccccagtttcatgaccagcatgaagggcacgagctgcttgccaaaggctcccatccaagtgtaggtctctacatcgtaggtgacaaagaggcgctccgtgcgaggatgagagccgatcgggaagaactggatctcccgccaccagttggaggattggctgttgatgtggtgaaagtagaagtcccgtctgcgggccgagcactcgtgctggcttttgtaaaagcgaccgcagtactggcagcgctgcacgggttgtatatcttgcacgaggtgaacctggcgacctctgacgaggaagcgcagcgggaatctaagtcccccgcctggggtcccgtgtggctggtggtcttctactttggttgtctggccgccagcatctgtctcctggagggcgatggtggagcagaccaccacgccgcgagagccgcaggtccagatctcggcgctcggcgggcggagtttgatgacgacatcgcgcacattggagctgtccatggtctccagctcccgcggcggcaggtcagctgggagttcctggaggttcacctcgcagagacgggtcaaggcgcgggcagtgttgagatggtatctgatttcaaggggcgtgttggcggcggagtcgatggcttgcaggaggccgcagccccggggggccacgatggttccccgcggggcgcgaggggaggcggaagctgggggtgtgttcagaagcggtgacgcgggcgggcccccggaggtagggggggttccggccccacgggcatgggcggcaggggcacgtcttcgccgcgcgcgggcaggggctggtgctggctccgaagagcgcttgcgtgcgcgacgacgcgacggttggtgtcctgtatctggcgcctctgagtgaagaccacgggtcccgtgaccttgaacctgaaagagagttcgacagaatcaatctcggcatcgttgacagcggcctggcgcaggatctcctgcacgtcgcccgagttgtcctggtaggcgatctctgccatgaactgctcgatctcttcctcctggagatctcctcgtccggcgcgctccacggtggccgccaggtcgttggagatgcgacccatgagctgcgagaaggcgttgagcccgccctcgttccagacccggctgtagaccacgcccccctcggcgtcgcgggcgcgcatgaccacctgggccaggttgagctccacgtgtcgcgtgaagacggcgtagttgcgcaggcgctggaaaaggtagttcagggtggtggcggtgtgctcggcgacgaagaagtacatgacccagcgccgcaacgtggattcattgatgtcccccaaggcctccaggcgctccatggcctcgtagaagtccacggcgaagttgaaaaactgggagttgcgagcggacacggtcaactcctcctccagaagacggatgagctcggcgacagtgtcgcgcacctcgcgctcgaaggccacggggggcgcttcttcctcttccacctcttcttccatgatcgcttcttcttcttcctcagccgggacgggagggggcggcggcggcgggggaggggcgcggcggcggcggcggcgcaccgggaggcggtcgatgaagcgctcgatcatctccccccgcatgcggcgcatggtctcggtgacggcgcggccgttctcccgggggcgcagctcgaagacgccgcctctcatctcgccgcggggcgggcggccgtgaggtagcgagacggcgctgactatgcatcttaacaattgctgtgtaggtacgccgccgagggacctgattgagtccagatccaccggatccgaaaacctttggaggaaagcgtctatccagtcgcagtcgcaaggtaggctgagcaccgtggcgggcgggggcgggtctggagagttcctggcggagatgctgctgatgatgtaattaaagtaggcggtcttgagaaggcggatggtggacaggagcaccatgtctttgggtccggcctgttggatgcggaggcggtcggccatgccccaggcctcgttctgacaccggcgcaggtctttgtagtagtcttgcatgagtctttccaccggcacctcttctccttcctcttctccatctcgccggtggtttctcgcgccgcccatgcgcgtgaccccaaagcccctgagcggctgcagcagggccaggtcggcgaccacgcgctcggccaagatggcctgctgcacctgagtgagggtcctctcgaagtcatccatgtccacgaagcggtggtaggcgcccgtgttgatggtgtaggtgcagttggccatgacggaccagttgacggtctggtgtcccggctgcgagagctccgtgtaccgcaggcgcgagaaggcgcgggaatcgaacacgtagtcgttgcaagtccgcaccagatactggtagcccaccaggaagtgcggcggaggttggcgatagaggggccagcgctgggtggcgggggcgccgggcgccaggtcttccagcataaggcggtggtatccgtagatgtacctggacatccaggtgatgccggcggcggtggtggtggcgcgcgcgtagtcgcggacccggttccagatgtttcgcaggggcaagaagtgttccatggtcggcacgctctggccggtgaggcgcgcgcagtcgttgacgctctatacacacacaaaaacgaaagcgtttacagggctttcgttctgtagcctggaggaaagtaaatgggttgggttgcggtgtgccccggttcgagaccaagctgagctcggccggctgaagccgcagctaacgtggtattggcagtcccgtctcgacccaggccctgtatcctccaggatacggtcgagagcccttttgctttcttggccaagcgcccgtggcgcgatctgggatagatggtcgcgatgagaggacaaaagcggctcgcttccgtagtctggagaaacaatcgccagggttgcgttgcggcgtaccccggttcgagcccctatggcggcttggatcggccggaaccgcggctaacgagggccgtggcagccccgtcctcaggaccccgccagccgacttctccagttacgggagcgagccccttttgtttttttattttttagatgcatcccgtgctgcggcagatgcgcccctcgccccggcccgatcagcagcagcaacagcaggcatgcagacccccctctcccctttccgccccggtcaccacggccgcggcggccgtgtcgggcgcggggggcgcgctggagtcagatgagccaccgcggcggcgacctaggcagtatctggacttggaagagggcgagggactggcgcggctgggggcgaactctccagagcgccacccgcgggtgcagttgaaaagggacgcgcgcgaggcgtacctgccgcggcagaacctgtttcgcgaccgcgggggcgaggagcccgaggagatgcgagactgcaggttccaagcggggcgcgagctgcggcgcgggctggacagacagcgcctgctgcgcgaggaggactttgagcccgacacgcagacgggcatcagccccgcgcgcgcgcacgtagccgcggccgacctggtgaccgcctacgagcagacggtgaaccaggagcgcaacttccaaaagagcttcaacaaccacgtgcgcacgctggtggcgcgcgaggaggtgaccctgggtctcatgcatctgtgggacctggtggaggcgatcgtgcagaaccccagcagcaagcccctgaccgcgcagctgttcctggtggtgcagcacagcagggacaacgaggccttcagggaggcgctgctgaacatcaccgagccggaggggcgctggctcctggacctgataaacatcctgcagagcatagtggtgcaggagcgcagcctgagcctggccgagaaggtggcggccatcaactactctatgctgagcctgggcaagttctacgcccgcaagatctacaagaccccctacgtgcccatagacaaggaggtgaagatagacagcttctacatgcgcatggcgctgaaggtgctgaccctgagcgacgacctgggagtgtaccgcaacgagcgcatccacaaggccgtgagcgccagccggcggcgcgagctgagcgaccgcgagctgatgcacagtctgcagcgcgcgctgaccggcgcgggcgagggcgacagggaggtcgagtcctacttcgacatgggggccgacctgcactggcagccgagccgccgcgccctggaggcggcgggggcgtacggcggccccctggcggacgatgaccaggaagaggaggactatgagctagaggagggcgagtacctggaggactgacctggctggtggtgttttggtatagatgcaagatccgaacgtggcggacccggcggtccgggcggcgctgcagagccagccgtccggcattaactcctctgacgactgggccgcggccatgagtcgcatcatggccctgaccgcgcgcaaccccgaggctttcaggcagcagcctcaggccaaccggctggcggccatcttggaagcggtagtgcccgcgcgctccaaccccacccacgagaaggtgctggccatagtcaacgcgctggcggagagcagggccatccgcgcggacgaggccggactggtgtacgatgcgctgctgcagcgggtggcgcggtacaacagcggcaacgtgcagaccaacctggaccgcctggtgacggatgtgcgcgaggccgtggcgcagcgcgagcgcttgcatcaggacggtaacctgggctcgctggtggcgctaaacgccttcctcagcacccagccggccaacgtaccgcgggggcaggaggactacaccaactttttgagcgcgctgcggctgatggtgaccgaggtccctcagagcgaggtgtaccagtcggggcccgactacttcttccagaccagcagacagggcttgcaaaccgtgaacctgagccaggctttgaagaacctgcgggggctgtggggagtgaaggcgcccaccggcgaccgggctacggtgtccagcctgctaacccccaactcgcgcctgctgctgctgctgatcgcgcccttcacggacagcgggagcgtctcgcgggaaacctatctgggccacctgctgacgctgtaccgcgaggccatcgggcaggcgcaggtggacgagcacaccttccaagagatcaccagcgtgagccacgcgctggggcaggaggacacgggcagcctgcaggcgaccctgaactacctgctgaccaacaggcggcagaagattcccacgctgcacagcctgacgcaggaggaggagcgcatcttgcgctacgtgcagcagagcgtgagcctgaacctgatgcgcgacggcgtgacgcccagcgtggcgctggacatgaccgcgcgcaacatggaaccgggcatgtacgcctcccaccggccgttcattaaccgcctgatggactacttgcatcgggcggcggccgtgaaccccgagtacttcactaatgccattctgaatccccactggatgccccctccgggtttctacaacggggacttcgaggtgcccgaggttaacgacgggttcctctgggatgacatggatgacagtgtgttctcacccaacccgctgcgcgccgcgtctctgcgattgaaggagggttctgacagggaaggaccgaggagtctggcctcctccctggctctgggagcggtgggcgcggcggcgcggggcagtagccccttccccagcctggcagactctctgaacagcgggcgggtgagcaggccccgcttgctaggcgaggaggagtatctgaacaactccctgctgcagcccgcgagggacaaaaacgctcagcggcagcagtttcccaacaatgggatagagagcctggtggacaagatgtccagatggaagacgtatgcgcaggagtacaaggagtgggaggaccgccagccgcggcccctgccgccccctaggcagcgctggcagcggcgcgcgtccaaccgccgctggaggcaggggcccgaggacgatgatgactctgcagatgacagcagcgtgctggacctgggcgggagcgggaaccccttttcgcacctgcgcccccgcctgggcaagatgttttaaaagagaaaaaataaaaactcaccaaggccatggcgacgagcgttggttttttgttcccttccttagtatgcgacgcgcggcgatgttcgaggaggggcctcccccctcttacgagagcgcgatgggattttctcctgcgacgcccctacagcctccctacgtgcctcctcggtacctgcaacctaccgggggaagaaatagcatctgttactctgagctgcagcccctgtatgacaccaccaaagtgtacctggtggacaacaagtctgcggacgtggcctccctgaactaccagaacgaccacagcgattttttgaccaccgtgatccaaaacaatgacttcaccccaaacgaggccagcacccagaccataaacctggacaacaggtcgcactggggcggtgatctgaagaccatcttgcacaccaacatgcccaacgtgaatgagtttatgtttactaactcttttaaggcgcgggtaatggtggcgcgcgacgataagggagtgcctaaatacgagtgggtggactttacactgcccgagggcaactactccgagatcatgactcttgacctgatgaacaacgcgatcgtggagcactacttgaaagtaggcaggcagaacggggtaaaagaaagcgatattggagttaagtttgacaccaggaactttcgcctgggatgggaccccgagacggggttggttatgcccggggtttacactaatgaagcttttcaccccgatatagtgctcttgcccggatgcggggtggacttcacccaaagccggctgagcaacctgctgggcattcgaaagcgccagccattccaggaggggtttcaaatcacttatgagcatttggaagggggcaacattccggcgcttctggatttggtcgcctacgaggagagtttgaaatccgaggaaagcggggataacactgacaagggcggcgaggagcaagccggcgatggcgacactgcttcggtagaaaacgaaagtgcgtccgtggtggaggcggcggcggtagcgaccgcagagccggagaccgtagaggaggatatgaatgatagcgcaatcagaggagactcgtttattccccggggcgaagaaaagaaggcggaggctgcggcagcagtcgaagcagagcccaaagtcgagtcggagatcatggaggaggatttgaatgataacgcgatcagaggtgatacgtttgtgccgcggggcgaagaaaaaaaagcggaggcggaggccgcggctgaggaggcggccgaggctgtggcagccaccgcggcggtgactgaaacaactgaggagcaggttcaggccgagcaggttcaaaagaagcccgtgattaaagccctaacacaagatagcaaggagcgcagttacaacttgattcccggtagtactgacaccgagtaccgcagctggtacctggcatacaactacggcgacccggtcaaaggggtgcgctcgtggactctgctttgcacgccggacgtcacctgcggctccgagcagatgtactggtcgttgccaaacatgatgcaagacccggtgaccttccgctccacgcggcaggttaacaacttcccggtggtgggcgccgaactgctgcccgtgcactccaagagcttttacaacgagcaggccgtgtactcccagctgatccgccaggccacctctctgacccacgtgttcaatcgctttcccgagaaccagattttggcgcgcccgccggcccccaccatcactaccgtcagtgaaaacgttcctgctctcacagatcacgggacgctaccgctgcgcaacagcatctcaggagtccagcgagtgaccattactgacgccagacgccggacctgcccctacgtttacaaggccttgggcatagtctcgccgcgcgtcctctccagccgcactttttaaaacacatattcacccacgcttcaaagattatgtctatacttatctcacccagcaataacaccggctgggggctgcgcgcgcccagcaagatgtttggaggggcgagaaaacgttccgagcagcacccagtgcgcgtgcgcggccactaccgcgcgccctggggagcgcacaagcgcgggcgcgcagggcgcaccactgtggacgacgccattgactccgtagtggagcaggcgcgccactacacacccggcgcgccgtccgcccccgccgtgtccaccgtggacgaggcgatcgaaagcgtggtacagggcgcgcggcactatgccaaccttaaaaatcgccgccgtcgcgtggcccgccgccatcgccggagaccccgggccaccgccgccgcgcgccttgctaaggctctactcaggcgcgccaggcgaactggccgccgggccgccatgagggccgcacggcgggctgccgccagtgcggccgccgcggccccacgggcacgaaggcgcgcggccgctgccgccgccgccgccatttccagcttggcctcaacgcggcgcggtaacatatactgggtgcgcgactcgataaccggcacgcgggtacccgtgcgctttcgccccccgcggaattagcacaagacaacatacacactgagtctcctgctgttgtgtatcccagcggcgaccgtcagcagcggcgacatgtccaagcgcaaaattaaagaagagatgctccaggtcatcgcgccggagatctatgggcccccgaagaaggaggaggatgattacaagccccgcaagctaaagcgggtcaaaaagaaaaagaaagatgatgatgatgacgaggcggtggagtttgtccgccgcatggcacccaggcgccccgtgcagtggaagggtcggcgcgtgcagcgcgttttgcgccccggcaccgcggtggtcttcacgcccggcgagcgctccacgcgcactttcaagcgggtgtacgatgaggtgtacggcgacgaggacctgttggagcaggccaaccagcgctttggggagtttgcatatgggaaacggccccgcgagagtctaaaagaggacctgctggcgctaccgctggacgagggcaatcccaccccgagtctgaagccggtgaccctgcaacaggtgctgcctttgagcgcgcccagcgagcataagcgagggttgaagcgcgagggcggggacctggcgcccaccgtgcagttgatggtgcccaagcggcagaagctggaggacgtgctggagaaaatgaaagtagagcccgggatccagcccgagatcaaggtccgccccatcaagcaggtggcgcccggcgtgggagtccagaccgtggacgttaggattcccacggaggagatggaaacccaaaccgccactccctcttcagcggccagcgccaccaccggcaccgcttcggtagaggtgcagacggacccctggctacccgccgccgctgtcgccgccgccgccgccccccgttctcgcgggcgcaagagaaattatccagtggccagcgcgctcatgccccagtacgcactgcatccatccatcgcgcccacccccggctaccgcgggtattcgtaccgcccgcgcagatcggccggcactcgcggccgccgccgccgtgcgaccacaaccagccgccgccgtcgccgccgccgccagccagtgctgacccccgtgtctgtaaggaaggtggctcgctcggggagcacgctggtggtgcccagagcgcgctaccaccccagcatcgtttaaagccggtctctgtatggttcttgcagatatggccctcacttgtcgcctccgcttcccggtgccgggataccgaggaagaactcaccgccgcagaggcatggcgggcagcggtctccgcggcggccgtcgccatcgccggcgcgcaaaaagcaggcgcatgcgcggcggtgtgctgcctctgctaatcccgctaatcgccgcggcgatcggtgccgtacccgggatcgcctccgtggccctgcaggcgtcccagaaacgttgactcttgcaaccttgcaagcttgcatttttttggaggaaaaaataaaaaagtctagactctcacgctcgcttggtcctgtgactattttgtagaaaaaagatggaagacatcaactttgcgtcgctggccccgcgtcatggctcgcgcccgttcatgggagactggacagatatcggcaccagcagtatgagcggtggcgccttcagctggggcagtctgtggagcggccttaaaaattttggttccaccattaaaaactatggcaacaaagcgtggaacagcagcacgggccagatgctaagagacaagttgaaagagcagaacttccaggagaaggtggcgcagggcctggcctctggcatcagcggggtggtggacatagctaaccaggccgtgcagaaaaagataaacagtcatctggacccccgccctcaggtggaggaaacgcctccagccatggagacggtgtttcccgagggcaaaggcgaaaagcgcccgcggcccgacagggaagagaccctggtgtcacacaccgaggagccgccctcttacgaggaggcactcaaggccggcctgcccaccactcgccccgtagctcccatggccacaggtgtggtgggccataaacaacacacccccgcaacactagatctgcccccgccgtccgagccgccgcgtcagccaaagacggcgacggtgcccgctccctccacttccgccgccaacagagtgtccctgcgccgcactacgggcgcccctcggggaccgcgactgagcggcaactggcagagcacactgaacagcattgtgggcctgggagtgaaaagtgtgaagcgccgccgttgctactgaatgagcaagctagctaacgtgttatatgtgtgtatgcgtcctatgtcgccgccagaggagctgttgagccgcccgcgccgtctgcactccagcgaatttcaagatggcgaccccttcgatgatgccacagtggtcgtacatgcacatctcgggccaggacgcctcggagtacctgagccccgggctggtgcagttcgcccgcgccaccgacagctacttcagcctaagtaacaaatttaggaaccctacggtggcacccacccacgatgtgaccacggaccggtcgcagcgcctgacgctgcggtttatccccgtggatcgggaggacactgcctactcttacaaggcgcgcttcacgctagccgtgggcgacaaccgcgtgctggacatggcctccacctactttgatatccggggtgtgctggacaggggtcccacctttaagccctactcgggcactgcctacaactccctggctcctaaaggcgctcccaattcttgcgagtgggatgaaaaaactaatactgctgaagcagccattgaaaatgaagaagagctggcggatgagccagaagagcaagcagaagaggctataaaaaccaatgtgtttgcccaggcgccatattctggcaatgcaatttccaaagaaggaatacaagtaggcatagaaggcattggagagcaagtaaaagccgtatacgcagacaaaacctaccagccggaacctcaggttggagaaactcaatggaatgagactgaaataaatcatggagcaggaagggtgctgaagaagaccactcccatgaagccttgctatggttcttatgctaaacctactaatgaatatggaggccagggcatccttgtagaaaaaaatggcaaaatggaaagccaggtggaaacacagttttttgctcttgacggtgaaaatgataatagtccaaaagtggtgttgtatagcgaagatgtaaacttggatactcctgacacacacctatcatacaaacctagcgcccaagatgtaaactctaaagaaatgttgggccaacaggccatgcccaacaggccaaatcttattgcttttagggacaactttattggacttatgtactacaacagcactggcaacatgggagtgctggcaggacaggcctcccaactaaatgccgtggtagacttgcaagacagaaacacagagttgtcataccagctgatgcttgattccattggagacagatcaagatattttgccatgtggaaccaggcggttgatagttacgatccagatgttagaattattgaaaaccatggcacagaggatgaacttccaaactactgttttcctttgggaggaatatttaatactcagagttttaaaaaggtaaaacctggaacggataacggatgggaaacagatgatgacttttcagataaaaatgaaataagagttggcaacaactttgccatggagatcaatatccaggcaaacctgtggagaagcttcttgtattccaatgtggctctctacctgccagataagatgaagtactctccaaccaacatagacatttccaccaacactaacacctatgactacatgaacaaaagagtggcgcctccaggcctggtggactgctatgtcaatctgggggccaggtggtcccttgatgtaatggataacatgaacccctttaaccaccaccgcaatgcgggcctgcgataccgttccatgcttctgggtaacggccgctacgtgcccttccacatccaggtgccccaaaagttctttgccatcaaaagccttctactcttgcctggctcgtacacctacgaatggaatttcagaaaggatgtgaacatggtcctacagagctctctgggcaacgaccttagggtggatggggccagcatcaagtttgacagcatcaccctttatgctacctttttccccatggcccacaacaccgcttccacgcttgaggccatgctcagaaacgacaccaacgaccagtccttcaatgactacctctctggggccaacatgctctaccccatccccgccaacgctaccaacgtgcccatctccattccctctcgcaactgggccgccttcagaggctgggcatttacccgccttaagaccaaggagaccccctccctgggctcgggttttgacccctactttgtctactcgggatccatcccctacctggatggcaccttctacctcaaccacacttttaagaagatatccatcatgtatgactcctctgtcagctggccgggcaacgaccgcctgctcacccccaatgagttcgaggtcaagcgcgccgtggacggcgagggctacaacgtggcccagtgcaacatgaccaaggactggttcctggtgcagatgctggccaactacaacataggctaccagggcttctacatcccagagagctacaaggacaggatgtactccttcttcagaaatttccaacccatgagcaggcaggtggtggacgagaccaaatacaaggactatcaggccgttggcatcactcaccagcacaacaactcgggattcgtgggctacctggcacccaccatgcgcgagggacaggcctaccccgccaacttcccctaccccttgataggcaagaccgcggtcgacagcgtcacccagaaaaagttcctctgcgaccgcaccctctggcgcatccccttttctagcaacttcatgtccatgggcgcgctcacggacctgggccagaacctgctctatgccaactccgcccatgcgctggacatgacttttgaggtggaccccatggacgagcccacccttctctatattgtgtttgaagtgttcgacgtggtcagagtgcaccagccgcaccgcggtgtcatcgagaccgtgtacctgcgcacgcccttctcggccggcaacgccaccacctaaggagacagcgccgccgcctgcatgacgggttccaccgagcaagagctcagggccatcgccagagacctgggatgcggaccctattttttgggcacctatgacaaacgcttcccgggcttcatctcccgagacaagctcgcctgcgccatcgtcaacacggccgcgcgcgagaccgggggcgtgcactggctggcctttggctgggacccgcgctccaaaacttgctacctctttgacccttttggcttctccgatcagcgcctcaagcagatctatgagtttgagtacgaggggctgctgcgccgcagcgcgcttgcctcctcgcccgaccgctgcatcacccttgagaagtccaccgagaccgtgcaggggccccactcggccgcctgcggtctcttctgctgcatgtttttgcacgcctttgtgcgctggccccagagtcccatggatcgcaaccccaccatgaacttgctcaagggagtgcccaacgccatgctccagagcccccaggtccagcccaccctgcgccacaaccaggaacagctctaccgcttcctggagcgccactccccctacttccgcagtcacagcgcgcgcatccggggggccacctctttctgccacttgcaagaaaacatgcaagacggaaaatgatgtacagctcgctttttaataaatgtaaagactgtgcactttatttatacacgggctctttctggttatttattcaacaccgccgtcgccatctagaaatcgaaagggttctgccgcgcgtcgccgtgcgccacgggcagagacacgttgcgatactggaagcggctcgcccacttgaactcgggcaccaccatgcggggcagtggttcctcggggaagttctcgccccacagggtgcgggtcagctgcagcgcgctcaggaggtcgggagccgagatcttgaagtcgcagttggggccggaaccctgcgcgcgcgagttgcggtacacggggttgcagcactggaacaccagcagggccggattatgcacgctggccagcaggctctcgtcgctgatcatgtcgctgtccagatcctccgcgttgctcagggcgaatggggtcatcttgcagacctgcctgcccaggaaaggcggcagcccgggcttgccgttgcagtcgcagcgcaggggcatcagcaggtgcccgcggcccgactgcgcctgcgggtacagcgcgcgcatgaaggcttcgatctgcctgaaagccacctgcgccttggctccctccgaaaagaacatcccacaggacttgctggagaactggttcgcgggacagctggcatcgtgcaggcagcagcgcgcgtcggtgttggcgatctgcaccacgttgcgaccccaccggttcttcactatcttggccttggaagcctgctccttcagcgcgcgctggccgttctcgctggtcacatccatctctatcacctgctccttgttgatcatgtttgtcccgtgcagacacttcaggtcgccctccgtctgggtgcagcggtgctcccacagcgcgcaaccggtgggctcccaattcttgtgggtcacccccgcgtaggcctgcaggtaggcctgcaagaagcgccccatcatggccacgaaggtcttctggctcgtaaaggtcagctgcaggccgcgatgctcttcgttcagccaggtcttgcagatggcggccagcgcctcggtctgctcgggcagcatcctaaaatttgtcttcaggtcgttatccacgtggtacttgtccatcatggcgcgcgccgcctccatgcccttctcccaggcggacaccatgggcaggcttagggggtttatcacttccaccggcgaggacaccgtactttcgatttcttcttcctccccctcttcccggcgcgcgcccacgctgctgcgcgctctcaccgcctgcaccaaggggtcgtcttcaggcaagcgccgcaccgagcgcttgccgcccttgacctgcttaatcagcaccggcgggttgctgaagcccaccatggtcagcgccgcctgctcttcttcgtcttcgctgtctaccactatctctggggaagggcttctccgctctgcggcggtgcgcttcttttttttcttgggagcagccgtgacggagtccgccacggcgacggaggtcgagggcgtggggctgggggtgcgcggtaccagggcctcgtcgccctcggactcttcctctgactccaggcggcggcggagtcgcttctttgggggcgcgcgcgtcagcggcggcggagacggggacggggacggggacgggacgccctccacagggggtggtcttcgcgcagacccgcggccgcgctcgggggtcctctcgagctggtcttggtctcgactggccattgtatcctcctcctcctaggcagagagacataaggagtctatcatgcaagtcgagaaggaggagagcttaaccaccccctctgacaccgccgatgcgcccgccgtcgccgtcgcccccgctgccgccgacgcgcccgccacaccgagcgacacccccgcggacccccccgccgacgcacccctgttcgaggaagcggccgtggagcaggacccgggctttgtctcggcagaggaggatttgcgagaggaggagaataaggagaagaagccctcagtgccaaaagatgataaagagcaagacgagcacgacgcagatgcacaccagggtgaagtcgggcggggggacggagggcatggcggcgccgactacctagacgaagggaacgacgtgctcttgaagcacctgcatcgtcagtgcgccatcgtttgcgacgctctgcaggagcgcagcgaagtgcccctcagcgtggcggaggtcagccacgcctacgagctcagcctcttctccccccgggtgcccccccgccgccgcgaaaacggcacatgcgagcccaacccgcgcctcaacttctaccccgccttcgtggtgcccgaggtcctggccacctatcacatcttctttcaaaattgcaagatccccctctcgtgccgcgccaaccgtagccgcgccgataagatgctggccctgcgccagggcgaccacatacctgatatcgccgctttggaagatgtgccaaagatctttgagggtctgggtcgcaacgagaagcgggcagcaaactctctgcaacaggaaaacagcgaaaatgagagtcacaccggggtactggtggagctcgagggcgacaacgcccgcctggcggtggtcaagcgcagcatcgaggtcacccactttgcctaccccgcgctaaacctgccccccaaagtcatgaacgcggccatggacgggctgatcatgcgccgcggccggcccctcgctccagatgcaaacttgcatgaggagaccgaggacggccagcccgtggtcagcgacgagcagctggcgcgctggctggagaccgcggaccccgccgaactggaggagcggcgcaagatgatgatggccgcggtgctggtcaccgtagagctggagtgtctgcagcgcttcttcggcgaccccgagatgcagagaaaggtcgaggagaccctgcactacaccttccgccagggctacgtgcgccaggcttgcaagatctccaacgtggagctcagcaacctggtgtcctacctgggcatcttgcatgagaaccgcctcgggcagagcgtgctgcactccaccctgcgcggggaggcgcgccgcgactacgtgcgcgactgcgtttacctcttcctctgctacacctggcagacggccatgggggtctggcagcagtgtctggaggagcgcaacctcaaagagctggagaagctcctgcagcgcgcgctcaaagacctctggacgggctacaacgagcgctcggtggccgccgcgctggccgacctcatcttccccgagcgcctgctcaaaaccctccagcaggggctgcccgacttcaccagccaaagcatgttgcaaaacttcaggaactttatcctggagcgttctggcatcctacccgccacctgctgcgccctgcccagcgactttgtccccctcgtgtaccgcgagtgccccccgccgctgtggggtcactgctacctgttccaactggccaactacctgtcctaccacgcggacctcatggaggactccagcggcgaggggctcatggagtgccactgccgctgcaacctctgcacgccccaccgctccctggtctgcaacacccaactgctcagcgagagtcagattatcggtaccttcgagctacagggtccgtcctcctcagacgagaagtccgcggctccggggctaaaactcactccggggctgtggacttccgcctacctgcgcaaatttgtacctgaagactaccacgcccacgagatcaggttttacgaggaccaatcccgcccgcccaaggcggagctgaccgcctgcgtcatcacccagggcgagatcctaggccaattgcaagccatccaaaaagcccgccaagattttttgctgaagaagggtcggggggtgtatctggacccccagtcgggtgaggagctcaacccggttcccccgctgccgccgccgcgggaccttgcttcccaggataagcatcgccatggctcccagaaagaagcagcagcggccgccactgccgccaccccacatgctggaggaagaggaggaatactgggacagtcaggcagaggaggtttcggacgaggaggagccggagacggagatggaagagtgggaggaggacagcttagacgaggaggcttccgaagccgaagaggcagacgcaacaccgtcaccctcggccgcagccccctcgcaggcgcccccgaagtccgctcccagcatcagcagcaacagcagcgctataacctccgctcctccaccgccgcgacccacggccgaccgcagacccaaccgtagatgggacaccaccggaaccggggccggtaagtcctccgggagaggcaagcaagcgcagcgccaaggctaccgctcgtggcgcgctcacaagaacgccatagtcgcttgcttgcaagactgcggggggaacatctccttcgcccgccgcttcctgctcttccaccacggtgtggccttcccccgtaacgtcctgcattactaccgtcatctctacagcccctactgcggcggcagtgagccagagacggtcggcggcggcggcgcccgtttcggcgcctaggaagacccagggcaagacttcagccaagaaactcgcggcggccgcggcgaacgcggtcgcgggggccctgcgcctgacggtgaacgaacccctgtcgacccgcgaactgaggaaccgaatcttccccactctctatgccatcttccagcagagcagagggcaggatcaggaactgaaagtaaaaaacaggtctctgcgctccctcacccgcagctgtctgtatcacaagagcgaagaccagcttcggcgcacgctggaggacgctgaggcactcttcagcaaatactgcgcgctcactcttaaggactagctccgcgcccttctcgaatttaggcgggaacgcctacgtcatcgcagcgccgccgtcatgagcaaggacattcccacgccatacatgtggagctatcagccgcagatgggactcgcggcgggcgcctcccaagactactccacccgcatgaactggctcagtgccggcccacacatgatctcacaggttaatgatatccgcacccatcgaaaccaaatattggtggagcaggcggcgattaccaccacgccccgcaataatcccaaccccagggagtggcccgcgtccctggtgtatcaggaaattcccggccccaccaccgtactacttccgcgtgattcccaggccgaagtccaaatgactaactcaggggcgcagctcgcgggcggctgtcgtcacagggtgcggccccctcgccagggtataactcacctggagatccgaggcagaggtattcagctcaacgacgagtcggtgagctcctcgctcggtctcagacctgacgggaccttccagatagccggagccggccgatcttccttcacgccccgccaggcgtacctgactctgcagagctcgtcctcggcgccgcgctcgggcggcatcgggactctccagttcgtgcaggagtttgtgccctcggtctacttcaaccccttctccggctctcccggtcgctacccggaccagttcatctcgaactttgacgccgcgagggactcggtggacggctacgactgaatgtcgggtggacccggtgcagagcaacttcgcctgaagcacctcgaccactgccgccgccctcagtgctttgcccgctgtcagaccggtgagttccagtacttttccctgcccgactcgcacccggacggcccggcgcacggggtgcgctttttcatcccgagtcaggtgcgctctaccctaatcagggagtttaccgcccgtcccctactggcggagttggaaaaggggccttctatcctaaccattgcctgcatctgctctaaccctggattgcaccaagatctttgctgtcatttgtgtgctgagtataataaaggctgagatcagaatctactcgggctcctgtcgccatcctgtcaacgccaccgtccaagcccggcccgatcagcccgaggtgaacctcacctgcggtctgcaccggcgcctgagaaaatacctagcttggtactacaacagcactccctttgtggtttacaacagctttgaccaggacggggtctcactgagggataacctctcgaacctgagctactccatcaggaagaacagcaccctcgagctacttcctccttacctgcccgggacttaccagtgtgtcaccggtccctgcacccacacccacctgttgatcgtaaacgactctcttccgagaacagacctcaataactcctcttcgcagttccccagaacaggaggtgagctcaggaaaccccgggtaaagaagggtggacaagagttaacacttgtggggtttctggtgtatgtgacgctggtggtggctcttttgattaaggcttttccttccatgtctgaactctccctcttcttttatgaacaactcgactagtgctaacgggaccctacccaacgaatcgggattgaatatcggtaaccaggttgcagtttcacttttgattaccttcatagtcctcttcctgctagtgctgtcgcttctgtgcctgcggatcgggggctgctgcatccacgtttatatctggtgctggctgtttagaaggttcggagaccatcgcaggtagaataaacatgctgctgcttaccctctttgtcctggcgctggccgccagctgccaagccttttccgaggctgattttatagaaccccagtgcaatatcacttataaatctgaatataacctctgcactatcctaattaaatgcgttactcaacacgatgaggtaactgttagatacaaagatcaatcaaaaagagacgcactttacagcagctggcaaccaggagatgaacaaaaatacaatgtgaccgtcttccagggcaaactctccaaaacttacaattacactttcccattcgaggagatgtgtgagtttgtcatgttcatgtcaaagcagtacaagatgtggcctccgactccccagggctgtgtggaaaatccaggctctttctgcatgatctctctctgtgtaactgtgctggcactaatactcacgcttttgtatatcagatttaaatcaaggcaaagcttcatcgatgaaaagaaaatgccttaatcgcttttcacgcttgattgctaacaccgggtttttatccgcagaatgattggaatcaccctactaatcacctccctccttgcgattgcccatgggttggaacgaatcgaagtccctgtgggggccaatgttaccctggtggggcctgtcggcaatgctacattaatgtgggaaaaatatactaaaaatcaatgggtctcttactgcactaacaaaaacagccacaagcccagagccatctgcgatgggcaaaatttaaccttgattgatgttcaattgctggatgcgggctactattatgggcagctgggtacaatcgttaattactggagaccccacaaagattacatgcttcacgtagtaaagggtccccttagcagcccgaccactaccaccacctctaccacacccactaccaccactactcccatcaccagcactgccacccagcctcctcatagcagaacaaccacttttatcaattccaagtcccactccccccacattgccggcgggccctccgcctcaaactccgagaccaccgagatctgcttctgcaaatgctctgacgccattgcccaggatttggaagaccacgaggaagatgagcatgacttcgcagatgcatgccaggcatcaggggcagaagcactgccggtggccctcaaacagtatgcagactcccataccacccccgatcttccaccgccttcccagaagccaagtttcctgggggaaaatgaaacactgcctctctccatacttgctttgacatctgttgctattctgactgctctgctggtgctcctatgctctatatgctacctgatctgctgcaggaagaaaaaatctcacggccatgctcaccagccgcttatgcacttcccttaccctccagagttgggcgaccacaaactttaagtctgcagtagctatctgcccatcccttgtcagtcgacagcgatgagccccactaatctaacggcctctggacttacaacattgtctcttaatgagaccaccgctcctcaagacctgtacgatggtgtctccgcgctggttaaccagtgggatcacctgggcatatggtggctcctcataggagcagtgaccctgtgcctaatcctggtctggataatctgctgcatcaaaagcagaagacccaggcggcggcccatctacaggcccttcgtcatcacacctgaagatgatgatggcaccacgtccaggctgcagagcctaaagcagctactcttctcttttacagcatggtaaattgaacatgcctcgcattttcatctacttgtttcttcttccactctttttgggctcttctacattggcagctgtgtcccacatcgaggtagactgcatctcgcccttctcagtctacttactcttcggctttgtcatttgcaactttgtctgcagcgttatcactgtagtgatctgcttcatacagtgcatcgactacgtctgcgtacgggtggcctattttagacaccacccccagtatcgcaacagggacatagcggctctcctaagacttgtttaaatcatgcccaaattaactgtgattgctcttctgattatctgctgcgtcctagccgcgattgggactcagcctactaccaccaccaccagcgctcccagaaagagacatgtttcctgcagcttcaaacgtccctggaatataccccaatgctttactgatgaacctgaaatctctttggcttggtacttcagcgtcaccgcccttctcatcttctgcagtacggttattgcccttgccatttacccttcccttgacctgggctggaatgctgtcaactctatggaatatcccaccttcccagaaccagacctgccagacctggttgttctaaacgcgtttcctcctcctcccgttcaaaatcagtttcgccctccgtccccgacgcccactgaggtcagctactttaatctaacaggcggagatgactgaaaacctagacctagaaatggacggcctctgcagcgaacaacgcatactagagaggcgccggcaaaaagcagagctcgagcgtcttaaacaagagctccaagacgcggtggccatacaccagtgcaaaaaaggtgtcttctgtctagtgaaacaggccacgctcacctatgaaaaaacaggtgacacccaccgcctaggatacaagctgcccacacaacgccagaagttcgcccttatgataggcgaacaacccatcaccgtcacccagcactctgtggagacagaaggctgcatacacgctccctgcaggggcgctgactgtctctacaccttgatcaaaaccctctgcggccttagagacctcatccctttcaattgatcataactgtaatcaataaaaaatcacttacttgaaatctgatagcaagcctctgtccaattttttcagcaacacttccttcccctcctcccaactctggtactctaggcgcctcctagctgcaaacttcctccacagtctgaagggaatgtcagattcctcctcctgtccctccgcacccacgatcttcatgttgttgcagatgaaacgcgcgagatcgtctgacgagaccttcaaccccgtgtacccctacgataccgagatcgctccgacttctgtcccttttcccacccctccctttgtgtcccccgcaggaatgcaagaaaacccccctggagtgctatccctacgccttgcagaacccttgaccacctccaatggagcgctgaccctaaaaatggggggtggtttgaccctggacgaagaaggaaagcttacttcccaaaatattaccagtgttgatcctcctcttaaaaaaacaaaaaacaatatcagtctgcagactgcctccccccttgccgtcagctcgggagccctcacacttttcgctactcctcccctggcagttaatgacaataacctaactgtgcagtctcaggctccccttacactggaaaactcaaaactaagtctggccaccaaaggccccctaaccgtttctgaaggaaaacttgccctagaaacagaggctcccttgcatgcaagcgacagcagtagcctaggccttagtgtaacggccccactgagcattagcagcgacagcctaggactagacttgcaagcgcccattatttctgaaaatggaaaactgggcctaagagtaacaggtcccctaactgtggccagcagtattgatgctttgacagtagccacaggcagcggtattggacttgatagcaacacgcgcctacaggcaaaattggtcgcgcccctaggctttgacaccaatggcaacattaagctcagcacttcgggcggcatgagactgaacaatggcacacttatactagatgtaaactacccatttgaggctcaaggtcaacttagtctaagagtgggttcgggtccactgtatgtagactccaacacacataacctaaccgctagatgccttagagggctatacataacgtcatctaataaccaaaccggcctggaggccaacataaaacttacaaaaggacttgtgtttgatggaaatgccatagcagttaatgttagcaaagggctagaatacagtaccactgaaacagcgcagggtgtaaatcccatacagactaaaataggtttgggcatggaatatgataccaatggagccataaagccaagactaggctctggtttgagctttgataattcaggagctattgtagtgggaaacaaaaatgatgacactcttactctgtggactacaccagacccatctcccaactgtcagattaactcggaaaaagatgctaaactaaccttggtactaaccaagtgcggtagtcaaattgtaggcacagtatctgcctttgctcttaaaggcagccttgccccaattaatggcacagtgagctcagttagtatattcctaagatttaatgaaaatggggtactgatgagcaactcatcgttggaaagccaatactggaattacaggaatggaaattcaactaatgccacaccatatacaaatgcactaggttttatgcctaacctggcagcttatcccaaaggccaggcaacgactgcaaaaagcagcatcattagccaggtttacatgaatggtgacacttccaaacctatgatatttacaataacttttaatgggcttgaaacagaggaaactcaggtcagtacatattccatgacattttcatggaggtggacaaatggagactacgtggggcactattttaaaacaaactcctttactttctcctacattgcccaagaataaagaaagcacagagatgcttgtttttgatttcaaaattgtgtgcttttatttatttcaagcttacagtatttccagtagtcattcgaatagagcttaattaaactgcatgagaacccttccacatagcttaaattagcaccagtgcaaatggagaaaaatcaacatacctttttatccagatatcagagaactctagtggtcagttttcccccaccctcccagctcacagaatacacagtcctttccccccggctggctttaaacaacactatctcattggtaacagacatattcttaggtgtaataatccacacggtctcttggcgggccaaacgctggtcggtgatgttaataaactccccaggcagctctttcaagttcacgtcgctgtccaactgctgaagcgctcgcggctccgactgcgcctctagcggaggcaacggcaacacccgatccttgatctataaaggagtagagtcataatcccccataagaatagggcggtgatgcagcaacaaggcgcgcagcaactcctgccgccgcctctccgtacggcaggaatgcaacggcgtggtggtctcctccgcgataatccgcaccgctcgcagcatcagcatcctcgtcctccgggcacagcagcgcatcctgatctcactgagatcggcgcagtaagtgcagcacaaaaccaagatgttatttaagatcccacagtgcaaagcgctgtacccaaagctcatggcgggaaggacagcccccacgtgaccatcataccagatcctcaggtaaatcaaatgacgacctctcataaacacgctggacatgtacatcacctccttgggcatgtgctgattcaccacctctcgataccacaagcatcgctgattaattaaagacccctcgagcaccatcctgaaccaggaagccagcacctgaccccccgccaggcactgcagggaccccggtgaatcgcagtggcagtgaagactccagcgctcgtagccgtgaaccatagagctggtcattatatccaaattggcacaacacagacacactttcatacactttttcatgattagcagctcctctctagtcaggaccatatcccaaggaatcacccactcttgaatcaaggtaaatcccacacagcagggcaggcctctcacataactcacgttatgcatagtgagcgtgtcgcaatctggaaataccggatgatcttccatcaccgaagcccgggtctccgtctcaaagggaggtaaacggtccctcgtgtagggacagtggcgggataatcgagatcgtgttgaacgtagagtcatgccaaagggaacagcggacgtactcatatttcctccagcagaaccaagtgcgcgcgtggcagctatccctgcgtcttctgtctcgccgcctgccccgttcggtgtagtagttgtaatacagccactccctgagaccgtcaaggcgctccctggcgtccggatctatgacaacaccgtcctgcagcgccgccctgatgacatccaccaccgtagagtatgccaagcccagccaggaaatgcattcactttgacagcgagagataggaggagcggggagagatggaagaaccatgatagtaaagagaacttttattccaatcgatcttctaagatatcaaagtggagatctataagatgacactggtctcctccgctgagtcgatcaaaaataacagctaaaccacaaacaacacgattggtcaaatgctccacaagggcctgcagcataaaattgcctcggaactccaccgcaagcataacatcaaagccaccgcctctatcgtgatcaagaataaaaaccccacagctatccaccagacccatatagttttcatctctccatcgtgaaaaaagatttacaagctcctcctttaaatcacctccaaccaattgaaaaagttgaaccagaccgccctccaccttcattttcagcaagcgtatcatgattgcaaaaattcaggctcctcagacacctgtataagattgagaagcggaacgttaacatcgatgtttcgctcgcgtaaatcacgcctcagtgcaagcataatataatcccacaggtcggagcggatcagcgaggacacctccccgccaggaaccaactcaacggagcctatgctgattataatacgcatattcggagctatgctaaccagcacggcccccaaataggcgtactgcataggcggcgacaaaaagtgaacagtttgggttaaaaaatcaggcaaacactcgcgcaaaaaagcaagaacatcataaccatgctcatgcaaatagatgcaagtaagctcaggaacgaccacagaaaaatgcacaatttttctctcaaacatgactgcgagccctgcaaaaaataaaaaagaaacattacacaagagtagcctgtcttacgatgggatagactactctaaccaacataagacgggccacaacatcgcccgcgtggccataaaaaaaattgtccgtgtgattaaaaagaagcacagatagctggccagtcatatccggagtcatcacgtgtgaacccgtgtagacccccgggttggacacatcggccaaagaaagaaagcggccaatgtacccaggaggaattataacactaagacgaagatacaacagaataaccccatgagggggaataacaaagttagtaggtgaataaaaacgataaacacccgaaactccctcctgcgtaggcaaaatagcaccctccccttccaaaacaacatatagcgcttccacagcagccatgacaaaagactcaaaacactcaaaagactcagtcttaccaggaaaataaaagcactctcacagcaccagcactaatcagagtgtgaaaagggccaagtgccgaacgagtatatataggaataaaaaatgacgtaaatgtgtaaaggtcagaaaacgcccagaaaaatacacagaccaacgcccgaaacgaaaacccgcgaaaaaatacccagaacttcctcaacaaccgccacttccgctttctcacgatacgtcacttccgcaagaaaagcaaaactacatttcccacatgtgtaaaaacgaaaccccgccccttctaaccgcccacaacttacatcatcaaaacgtaaagtcctacgtcacccgccccgcctctccccgcccacctcattatcatattggccacaatccaaaataaggtatattattgatgatg

SEQ ID NO: 53 - DNA, 37057 bp, Gorilla beringei graueri
ataatataccttattttggattgtggccaatatgataatgaggtgggcggggagaggcggggcgggtgacgtaggacgcgcgagtagggttgggaggtgtggcggaagtgtggcatttgcaagtgggaggagctcacatgcaagcttccgtcgcggaaaatgtgacgtttttgatgagcgccgcctacctccggaagtgccaattttcgcgcgcttttcaccggatatcgtagtaattttgggcgggaccatgtaagatttggccattttcgcgcgaaaagtgaaacggggaagtgaaaactgaataatagggcgttagtcatagcgcgtaatatttaccgagggccgagggactttgaccgattacgtggaggactcgcccaggtgttttttacgtgaatttccgcgttccgggtcaaagtctccgtttttattgtcaccgtcatttgacgcggagggtatttaaacccgctgcgctcctcaagaggccactcttgagtgccagcgagaagagttttctcctctgctccgcttcggtgatcgaaaaatgagacacatagcctgcactccgggtcttttgtccggtcgggcggcggccgagcttttggacgctttgatcaatgatgtcctgagcgatgattttccgtctactacccactttagcccacctactcttcacgaactgtacgatctggatgtactggtggatgtgaacgatcccaacgaggaggcggtttctgcgttttttcccgagtctgcgctgttggccgctcaggagggatttgacctacacactccgccgcctattttagagtctccgctgccggagcccagtggtataccttatatgcctgaactgcttcccgaagtggtagacctgacctgccacgagcctggctttccgcccagcgacgatgatggtgagccttttgttttagactttgctgagatacctgggcacggttgcaggtcttgtgcatatcatcagagggttaccggagaccccgaggttaagtgttcgctgtgctatatgaggatgacctcttcctttatctacagtaagtttttgtctaggtgggcttttgggtaggtgggttttgtgtcagaacaggtgtaaacgttgcttgtgttttttgtacctgtaggtccggtgtccgagccagacccggagcccgaccgcgatcccgagccggatcccgagcctcctcgcaggacaaggaaactaccttccattctgtgcaagtctcagacacctgtaaggaccagcgaggcagacagcaccgactctggcacttctacctctccccctgaaattcacccagtggttcctctgggtatacataaacctgttgctgttagagtttgcgggcgacgccctgcagtacagtgcattgaggacttgcttcacgatcccgaggaacctttggacttgagccttaaacgccctaggcaataaaccccacctaagtaataaaccccacctaagtaataaaccctgccgcccttggttattgagatgacgcccaatgtttgcttttgaatgacttcatgtgtgtaataaaagtgagtgtgatcataggtctcttgtttgtctgggcggggcttaagggtatataagtttctcggggctaaacttggttacacttgaccccaatggaggcgtgggggtgcttggaggagtttgcggacgtgcgccgtttgctggacgagagctctaaccatacctatactatttggaggtatctgtggggctctactcaggccaagttggtctccagaattaagcaggattacaagtgcgattttgaagagctttttagttcctgcggtgagcttttgcaatccttgaatctgggccatcaggctattttccaggaaaaggttctctcgactttggatttttccactcccgggcgcaccgccgcttgtgtggcttttgtgtcttttgtgcaagataaatggagcgaggagacccacctgagtcacggctacgtactggatttcatggcgatggctctttggagggctcacaacaaatggaagattcagaaggaactgtacggttccgccctacgtcgtccacttttgtcgcgacaggggctgaggtttcccgaccatcggcagcatcagaatctggaagacgagtcggaggagcgagcggaggagaagatcagcttgagagccggcctggaccctcctcaggaggaatgaatctcccgcaggtggttgacctgtttccagaactgagacgggtcctgactatcagggaggatggtcagtttgtgaagaagtttaagagggatcggggtgagggagatgatgaggcggctagcaatttagcttttagtctgatgactcgccaccgaccggaatgtattacctatcagcagattaaggagagttgtgccaacgagctggatcttttgggtcagaagtatagcatagaacagcttaccacttactggcttcagcctggggatgattgggaagaggcgatcagggtgtatgcaaaggtggccctgcggcccgattgcaagtataagattactaagttggttaatattagaaactgctgctatatttctgggaacggggccgaagtggagatagatactcaggacagggtggcttttaggtgttgcatgataaacatgtggcccgggatactggggatggatggggtggtgttcatgaatgtgaggtttacgggccccaactttaatggcacggtgttcatgggcaacaccaacttgctcctgcatggtgcgagtttctatgggtttaataacacctgtatagaggcctggaccgatgtaaaggttcgaggttgttccttttatagctgttggaaggcggtggtgtgtcgccctaaaagcaggggttctgtgaaaaaatgcttgtttgaaaggtgcaccttaggcatcctctctgagggcaactccagggtgcgccataatgtggcttcgaactgcggttgcttcatgcaagtgaagggggtgagcgttatcaagcataactcggtgtgtggaaactgcgaggatcgcgcctcccagatgctgacctgctttgatggtaactgtcacctgttgaagaccattcatataagcagccaccccagaaaggcctggcccgtgtttgagcataacatcctgacccgctgctccttgcatctgggggtcaggaggggtatgttcctgccttaccagtgtaactttagccacactaaaatcctgctggaacccgagtgtatgaccaaggtcagcctaaatggcgtgtttgatgcgactctgagaatctggaaggtgctgaggtatgatgagaccaggaccaggtgccgaccctgcgagtgcggcggcaagcacatgagaaatcagcctgtgatgttggatgtgaccgaggagcttaggcctgaccatctggtgctggcctgtaccagggccgagtttgggtctagcgatgaggataccgattgaggtgggtaaggtgggcgtggctagcagggtggggcgtgtataaattgggggtctaagggtctctctgttttgtcttgcaacagccgccgccatgagcgacaccggcaacagctttgatggaagcatctttagcccctatttgacagtgcgcatgcctcactgggctggagtgcgtcagaatgtgatgggttccaacgtggatggacgccccgttctgccttcaaattcgtctacaatggcctacgcgaccgtgggaggaactccgctggacgccgcgacctccgccgccgcctccgccgccgccgcgaccgcgcgcagcatggctacggacctttacagctctttggtggcgagcagcgcggcctctcgcgcgtctgctcgggatgagaaactgaccgctctgctgcttaaactggaagacttgacccgggagctgggtcaactgacccagcaggtctccagcttgcgtgagagcagccttgcctccccctaatggcccataatataaataaaagccagtctgtttggattaagcaagtgtatgttctttatttaactctccgcgcgcggtaagcccgggaccagcggtctcggtcgtttagggtgcggtggattctttccaacacgtggtacaggtggctctggatgtttagatacatgggcatgagtccatccctggggtggaggtagcaccactgcagagcttcgtgctcgggggtggtgttgtatatgatccagtcgtagcaggagcgctgggcgtggtgctgaaaaatgtccttaagcaagaggcttatagctagggggaggcccttggtgtaagtgtttacaaatctgctcagttgggaggggtgcatccggggggatataatgtgcatcttggactggatttttaggttggctatgttcccacccagatcccttctgggattcatgttgtgcaggaccaccagcacggtatatccagtgcacttgggaaatttatcgtggagcttagacgggaatgcatggaagaacttggagacgcccttgtggcctcccagattttccatacattcgtccatgatgatggcaatgggcccgtgggaagctgcctgagcaaaaatgtttctgggatcgctcacatcgtagttatgttccagggtgaggtcatcataagacatctttacaaatcgggggcggagggtcccggactggggtatgatggtaccctcgggccccggggcgtagttcccctcacagatctgcatctcccaggctttcatttcagagggagggatcatatccacctgcggagcgatgaaaaacacagtttctggcgcaggggagattaactgggatgagagcaggtttctgagcagctgtgactttccacagccggtgggcccatatatcacgcctatcaccggctgcagctggtagttaagagagctgcagctgccgtcctcccggagcaggggggccacctcgttcagcatatccctgacgtggatgttctccctgaccaattccgccagaaggcgctcgccgcccagcgaaagcagctcttgcaaggaagcaaaatttttcagcggttttaggccgtcggccgtgggcatgtttttcagcgtctgggtcagcagttccagcctgtcccacagctcggtgatgtgctctacggcatctcgatccagcagatctcctcgtttcgcgggttggggcggctttcgctgtagggcaccagccgatgggcgtccagcggggccagagtcatgtccttccatgggcgcagggtcctcgtcagggtggtctgggtcacggtgaaggggtgcgctccgggttgggcgctggccagggtgcgcttgaggctggttctgctggtgctgaatcgctgccgctcttcgccctgcgcgtcggccaggtagcatttgaccatggtctcgtagtcgagaccctcggcggcgtgccccttggcgcggagctttcccttggaggtggcgccgcacgaggggcactgcaggctcttcagggcgtagagcttgggagcgagaaacacggactctggggagtaggcgtccgcgccgcaggaagcgcagaccgtctcgcattccaccagccaagtgagctccgggcggtcagggtcaaaaaccaggttgcccccatgctttttgatgcgtttcttacctcggctctccatgaggcggtgtcccttctcggtgacgaagaggctgtccgtgtccccgtagaccgacttcaggggcctgtcttccagcggagtgcctctgtcctcctcgtagagaaactctgaccactctgagacgaaggcccgcgtccaggccaggacgaaggaggccacgtgggaggggtagcggtcgttgtccactagcgggtccaccttctccagggtgtgcaggcacatgtccccctcctccgcgtccagaaaagtgattggcttgtaggtgtaggacacgtgaccgggggttcccgacgggggggtataaaagggggtgggcgccctttcatcttcactctcttccgcatcgctgtctgcgagagccagctgctggggtaagtattccctctcgaaggcgggcatgacctcagcgctcaggttgtcagtttctaaaaatgaggaggatttgatgttcacctgtcctgaggtgatacctttgagggtacctgggtccatctggtcagaaaacactatttttttgttgtcaagcttggtggcgaacgacccgtagagggcgttggagagcagcttggcgatggagcgcagggtctggtttttgtcgcggtcggctcgctccttggccgcgatgttgagttgcacgtactcgcgggccacgcacttccactcggggaagacggtggtgcgctcgtctgggatcaggcgcaccctccagcctcggttgtgcagggtgaccatgtcgacgctggtggcgacctcgccgcgcaggcgctcgttggtccagcagaggcggccgcccttgcgcgagcagaaggggggtagggggtccagctggtcctcgtttggggggtccgcgtcgatggtgaagaccccggggagcaagcgcgggtcaaagtagtcgatcttgcaagcttgcatgtccagagcccgctgccattcgcgggcggcgagcgcgcgctcgtaggggttgaggggcgggccccagggcatggggtgggtgagcgcggaggcgtacatgccgcagatgtcatacacgtacaggggttccctgaggatgccgaggtaggtggggtagcagcgccccccgcggatgctggcgcgcacgtagtcatagagctcgtgggagggggccagcatgttgggcccgaggttggtgcgctgggggcgctcggcgcggaaggcgatctgcctgaagatggcatgggagttggaggagatggtgggccgctggaagacgttgaagcttgcttcttgcaagcccaccgagtccctgacgaaggaggcgtaggactcgcgcagcttgtgcaccagctcggcggtgacctggacgtcgagcgcgcagtagtcgagggtctcgcggatgatgtcatacttatcctcccccttctttttccacagctcgcggttgaggacgaactcttcgcggtctttccagtactcttggaggggaaacccgtccgtgtccgaacggtaagagcctagcatgtagaactggttgacggcctggtaggggcaacagcccttctccacgggcagcgcgtaggcctgcgccgccttgcggagggaggtgtgggtgagggcgaaagtgtccctgaccatgactttgaggtattgatgtttgaagtctgtgtcatcgcagccgccctgttcccacagggtgtagtccgtgcgctttttggagcgcgggttgggcagggagaaggtgaggtcattgaagaggatcttccccgctcgaggcatgaagtttctggtgatgcgaaagggccctgggaccgaggagcggttgttgatgacctgggcggccaggacgatctcgtcaaagccgtttatgttgtggcccacgatgtagagctccaaaaagcggggctggcccttgatggaggggagctttttgagttcctcgtaggtgagctcctcgggcgattccaggccgtgctcctccagggcccagtcttgcaagtgagggttggccgccaggaaggatcgccagaggtcgcgggccatgagggtctgcaggcggtcgcggaaggttctgaactgtcgccccacggccatcttttcgggggtgatgcagtagaaggtgagggggtctttctcccaggggtcccatctgagctctcgggcgaggtcgcgcgcggcggcgaccagagcctcgtcgccccccagtttcatgaccagcatgaagggcacgagctgcttgccaaaggctcccatccaagtgtaggtctctacatcgtaggtgacaaagaggcgctccgtgcgaggatgagagccgatcgggaagaactggatctcccgccaccagttggaggattggctgttgatgtggtgaaagtagaagtcccgtctgcgggccgagcactcgtgctggcttttgtaaaagcgaccgcagtactggcagcgctgcacgggttgtatatcttgcacgaggtgaacctggcgacctctgacgaggaagcgcagcgggaatctaagtcccccgcctggggtcccgtgtggctggtggtcttctactttggttgtctggccgccagcatctgtctcctggagggcgatggtggagcagaccaccacgccgcgagagccgcaggtccagatctcggcgctcggcgggcggagtttgatgacgacatcgcgcacattggagctgtccatggtctccagctcccgcggcggcaggtcagctgggagttcctggaggttcacctcgcagagacgggtcaaggcgcgggcagtgttgagatggtatctgatttcaaggggcgtgttggcggcggagtcgatggcttgcaggaggccgcagccccggggggccacgatggttccccgcggggcgcgaggggaggcggaagctgggggtgtgttcagaagcggtgacgcgggcgggcccccggaggtagggggggttccggccccacgggcatgggcggcaggggcacgtcttcgccgcgcgcgggcaggggctggtgctggctccgaagagcgcttgcgtgcgcgacgacgcgacggttggtgtcctgtatctggcgcctctgagtgaagaccacgggtcccgtgaccttgaacctgaaagagagttcgacagaatcaatctcggcatcgttgacagcggcctggcgcaggatctcctgcacgtcgcccgagttgtcctggtaggcgatctctgccatgaactgctcgatctcttcctcctggagatctcctcgtccggcgcgctccacggtggccgccaggtcgttggagatgcgacccatgagctgcgagaaggcgttgagcccgccctcgttccagacccggctgtagaccacgcccccctcggcgtcgcgggcgcgcatgaccacctgggccaggttgagctccacgtgtcgcgtgaagacggcgtagttgcgcaggcgctggaaaaggtagttcagggtggtggcggtgtgctcggcgacgaagaagtacatgacccagcgccgcaacgtggattcattgatgtcccccaaggcctccaggcgctccatggcctcgtagaagtccacggcgaagttgaaaaactgggagttgcgagcggacacggtcaactcctcctccagaagacggatgagctcggcgacagtgtcgcgcacctcgcgctcgaaggccacggggggcgcttcttcctcttccacctcttcttccatgatcgcttcttcttcttcctcagccgggacgggagggggcggcggcggcgggggaggggcgcggcggcggcggcggcgcaccgggaggcggtcgatgaagcgctcgatcatctccccccgcatgcggcgcatggtctcggtgacggcgcggccgttctcccgggggcgcagctcgaagacgccgcctctcatctcgccgcggggcgggcggccgtgaggtagcgagacggcgctgactatgcatcttaacaattgctgtgtaggtacgccgccgagggacctgattgagtccagatccaccggatccgaaaacctttggaggaaagcgtctatccagtcgcagtcgcaaggtaggctgagcaccgtggcgggcgggggcgggtctggagagttcctggcggagatgctgctgatgatgtaattaaagtaggcggtcttgagaaggcggatggtggacaggagcaccatgtctttgggtccggcctgttggatgcggaggcggtcggccatgccccaggcctcgttctgacaccggcgcaggtctttgtagtagtcttgcatgagtctttccaccggcacctcttctccttcctcttctccatctcgccggtggtttctcgcgccgcccatgcgcgtgaccccaaagcccctgagcggctgcagcagggccaggtcggcgaccacgcgctcggccaagatggcctgctgcacctgagtgagggtcctctcgaagtcatccatgtccacgaagcggtggtaggcgcccgtgttgatggtgtaggtgcagttggccatgacggaccagttgacggtctggtgtcccggctgcgagagctccgtgtaccgcaggcgcgagaaggcgcgggaatcgaacacgtagtcgttgcaagtccgcaccagatactggtagcccaccaggaagtgcggcggaggttggcgatagaggggccagcgctgggtggcgggggcgccgggcgccaggtcttccagcataaggcggtggtatccgtagatgtacctggacatccaggtgatgccggcggcggtggtggtggcgcgcgcgtagtcgcggacccggttccagatgtttcgcaggggcaagaagtgttccatggtcggcacgctctggccggtgaggcgcgcgcagtcgttgacgctctatacacacacaaaaacgaaagcgtttacagggctttcgttctgtagcctggaggaaagtaaatgggttgggttgcggtgtgccccggttcgagaccaagctgagctcggccggctgaagccgcagctaacgtggtattggcagtcccgtctcgacccaggccctgtatcctccaggatacggtcgagagcccttttgctttcttggccaagcgcccgtggcgcgatctgggatagatggtcgcgatgagaggacaaaagcggctcgcttccgtagtctggagaaacaatcgccagggttgcgttgcggcgtaccccggttcgagcccctatggcggcttggatcggccggaaccgcggctaacgagggccgtggcagccccgtcctcaggaccccgccagccgacttctccagttacgggagcgagccccttttgtttttttattttttagatgcatcccgtgctgcggcagatgcgcccctcgccccggcccgatcagcagcagcaacagcaggcatgcagacccccctctcccctttccgccccggtcaccacggccgcggcggccgtgtcgggcgcggggggcgcgctggagtcagatgagccaccgcggcggcgacctaggcagtatctggacttggaagagggcgagggactggcgcggctgggggcgaactctccagagcgccacccgcgggtgcagttgaaaagggacgcgcgcgaggcgtacctgccgcggcagaacctgtttcgcgaccgcgggggcgaggagcccgaggagatgcgagactgcaggttccaagcggggcgcgagctgcggcgcgggctggacagacagcgcctgctgcgcgaggaggactttgagcccgacacgcagacgggcatcagccccgcgcgcgcgcacgtagccgcggccgacctggtgaccgcctacgagcagacggtgaaccaggagcgcaacttccaaaagagcttcaacaaccacgtgcgcacgctggtggcgcgcgaggaggtgaccctgggtctcatgcatctgtgggacctggtggaggcgatcgtgcagaaccccagcagcaagcccctgaccgcgcagctgttcctggtggtgcagcacagcagggacaacgaggccttcagggaggcgctgctgaacatcaccgagccggaggggcgctggctcctggacctgataaacatcctgcagagcatagtggtgcaggagcgcagcctgagcctggccgagaaggtggcggccatcaactactctatgctgagcctgggcaagttctacgcccgcaagatctacaagaccccctacgtgcccatagacaaggaggtgaagatagacagcttctacatgcgcatggcgctgaaggtgctgaccctgagcgacgacctgggagtgtaccgcaacgagcgcatccacaaggccgtgagcgccagccggcggcgcgagctgagcgaccgcgagctgatgcacagtctgcagcgcgcgctgaccggcgcgggcgagggcgacagggaggtcgagtcctacttcgacatgggggccgacctgcactggcagccgagccgccgcgccctggaggcggcgggggcgtacggcggccccctggcggacgatgaccaggaagaggaggactatgagctagaggagggcgagtacctggaggactgacctggctggtggtgttttggtatagatgcaagatccgaacgtggcggacccggcggtccgggcggcgctgcagagccagccgtccggcattaactcctctgacgactgggccgcggccatgagtcgcatcatggccctgaccgcgcgcaaccccgaggctttcaggcagcagcctcaggccaaccggctggcggccatcttggaagcggtagtgcccgcgcgctccaaccccacccacgagaaggtgctggccatagtcaacgcgctggcggagagcagggccatccgcgcggacgaggccggactggtgtacgatgcgctgctgcagcgggtggcgcggtacaacagcggcaacgtgcagaccaacctggaccgcctggtgacggatgtgcgcgaggccgtggcgcagcgcgagcgcttgcatcaggacggtaacctgggctcgctggtggcgctaaacgccttcctcagcacccagccggccaacgtaccgcgggggcaggaggactacaccaactttttgagcgcgctgcggctgatggtgaccgaggtccctcagagcgaggtgtaccagtcggggcccgactacttcttccagaccagcagacagggcttgcaaaccgtgaacctgagccaggctttgaagaacctgcgggggctgtggggagtgaaggcgcccaccggcgaccgggctacggtgtccagcctgctaacccccaactcgcgcctgctgctgctgctgatcgcgcccttcacggacagcgggagcgtctcgcgggaaacctatctgggccacctgctgacgctgtaccgcgaggccatcgggcaggcgcaggtggacgagcacaccttccaagagatcaccagcgtgagccacgcgctggggcaggaggacacgggcagcctgcaggcgaccctgaactacctgctgaccaacaggcggcagaagattcccacgctgcacagcctgacgcaggaggaggagcgcatcttgcgctacgtgcagcagagcgtgagcctgaacctgatgcgcgacggcgtgacgcccagcgtggcgctggacatgaccgcgcgcaacatggaaccgggcatgtacgcctcccaccggccgttcattaaccgcctgatggactacttgcatcgggcggcggccgtgaaccccgagtacttcactaatgccattctgaatccccactggatgccccctccgggtttctacaacggggacttcgaggtgcccgaggttaacgacgggttcctctgggatgacatggatgacagtgtgttctcacccaacccgctgcgcgccgcgtctctgcgattgaaggagggttctgacagggaaggaccgaggagtctggcctcctccctggctctgggagcggtgggcgcggcggcgcggggcagtagccccttccccagcctggcagactctctgaacagcgggcgggtgagcaggccccgcttgctaggcgaggaggagtatctgaacaactccctgctgcagcccgcgagggacaaaaacgctcagcggcagcagtttcccaacaatgggatagagagcctggtggacaagatgtccagatggaagacgtatgcgcaggagtacaaggagtgggaggaccgccagccgcggcccctgccgccccctaggcagcgctggcagcggcgcgcgtccaaccgccgctggaggcaggggcccgaggacgatgatgactctgcagatgacagcagcgtgctggacctgggcgggagcgggaaccccttttcgcacctgcgcccccgcctgggcaagatgttttaaaagagaaaaaataaaaactcaccaaggccatggcgacgagcgttggttttttgttcccttccttagtatgcgacgcgcggcgatgttcgaggaggggcctcccccctcttacgagagcgcgatgggattttctcctgcgacgcccctacagcctccctacgtgcctcctcggtacctgcaacctaccgggggaagaaatagcatctgttactctgagctgcagcccctgtatgacaccaccaaagtgtacctggtggacaacaagtctgcggacgtggcctccctgaactaccagaacgaccacagcgattttttgaccaccgtgatccaaaacaatgacttcaccccaaacgaggccagcacccagaccataaacctggacaacaggtcgcactggggcggtgatctgaagaccatcttgcacaccaacatgcccaacgtgaatgagtttatgtttactaactcttttaaggcgcgggtaatggtggcgcgcgacgataagggagtgcctaaatacgagtgggtggactttacactgcccgagggcaactactccgagatcatgactcttgacctgatgaacaacgcgatcgtggagcactacttgaaagtaggcaggcagaacggggtaaaagaaagcgatattggagttaagtttgacaccaggaactttcgcctgggatgggaccccgagacggggttggttatgcccggggtttacactaatgaagcttttcaccccgatatagtgctcttgcccggatgcggggtggacttcacccaaagccggctgagcaacctgctgggcattcgaaagcgccagccattccaggaggggtttcaaatcacttatgagcatttggaagggggcaacattccggcgcttctggatttggtcgcctacgaggagagtttgaaatccgaggaaagcggggataacactgacaagggcggcgaggagcaagccggcgatggcgacactgcttcggtagaaaacgaaagtgcgtccgtggtggaggcggcggcggtagcgaccgcagagccggagaccgtagaggaggatatgaatgatagcgcaatcagaggagactcgtttattccccggggcgaagaaaagaaggcggaggctgcggcagcagtcgaagcagagcccaaagtcgagtcggagatcatggaggaggatttgaatgataacgcgatcagaggtgatacgtttgtgccgcggggcgaagaaaaaaaagcggaggcggaggccgcggctgaggaggcggccgaggctgtggcagccaccgcggcggtgactgaaacaactgaggagcaggttcaggccgagcaggttcaaaagaagcccgtgattaaagccctaacacaagatagcaaggagcgcagttacaacttgattcccggtagtactgacaccgagtaccgcagctggtacctggcatacaactacggcgacccggtcaaaggggtgcgctcgtggactctgctttgcacgccggacgtcacctgcggctccgagcagatgtactggtcgttgccaaacatgatgcaagacccggtgaccttccgctccacgcggcaggttaacaacttcccggtggtgggcgccgaactgctgcccgtgcactccaagagcttttacaacgagcaggccgtgtactcccagctgatccgccaggccacctctctgacccacgtgttcaatcgctttcccgagaaccagattttggcgcgcccgccggcccccaccatcactaccgtcagtgaaaacgttcctgctctcacagatcacgggacgctaccgctgcgcaacagcatctcaggagtccagcgagtgaccattactgacgccagacgccggacctgcccctacgtttacaaggccttgggcatagtctcgccgcgcgtcctctccagccgcactttttaaaacacatattcacccacgcttcaaagattatgtctatacttatctcacccagcaataacaccggctgggggctgcgcgcgcccagcaagatgtttggaggggcgagaaaacgttccgagcagcacccagtgcgcgtgcgcggccactaccgcgcgccctggggagcgcacaagcgcgggcgcgcagggcgcaccactgtggacgacgccattgactccgtagtggagcaggcgcgccactacacacccggcgcgccgtccgcccccgccgtgtccaccgtggacgaggcgatcgaaagcgtggtacagggcgcgcggcactatgccaaccttaaaaatcgccgccgtcgcgtggcccgccgccatcgccggagaccccgggccaccgccgccgcgcgccttgctaaggctctactcaggcgcgccaggcgaactggccgccgggccgccatgagggccgcacggcgggctgccgccagtgcggccgccgcggccccacgggcacgaaggcgcgcggccgctgccgccgccgccgccatttccagcttggcctcaacgcggcgcggtaacatatactgggtgcgcgactcgataaccggcacgcgggtacccgtgcgctttcgccccccgcggaattagcacaagacaacatacacactgagtctcctgctgttgtgtatcccagcggcgaccgtcagcagcggcgacatgtccaagcgcaaaattaaagaagagatgctccaggtcatcgcgccggagatctatgggcccccgaagaaggaggaggatgattacaagccccgcaagctaaagcgggtcaaaaagaaaaagaaagatgatgatgatgacgaggcggtggagtttgtccgccgcatggcacccaggcgccccgtgcagtggaagggtcggcgcgtgcagcgcgttttgcgccccggcaccgcggtggtcttcacgcccggcgagcgctccacgcgcactttcaagcgggtgtacgatgaggtgtacggcgacgaggacctgttggagcaggccaaccagcgctttggggagtttgcatatgggaaacggccccgcgagagtctaaaagaggacctgctggcgctaccgctggacgagggcaatcccaccccgagtctgaagccggtgaccctgcaacaggtgctgcctttgagcgcgcccagcgagcataagcgagggttgaagcgcgagggcggggacctggcgcccaccgtgcagttgatggtgcccaagcggcagaagctggaggacgtgctggagaaaatgaaagtagagcccgggatccagcccgagatcaaggtccgccccatcaagcaggtggcgcccggcgtgggagtccagaccgtggacgttaggattcccacggaggagatggaaacccaaaccgccactccctcttcagcggccagcgccaccaccggcaccgcttcggtagaggtgcagacggacccctggctacccgccgccgctgtcgccgccgccgccgccccccgttctcgcgggcgcaagagaaattatccagtggccagcgcgctcatgccccagtacgcactgcatccatccatcgcgcccacccccggctaccgcgggtattcgtaccgcccgcgcagatcggccggcactcgcggccgccgccgccgtgcgaccacaaccagccgccgccgtcgccgccgccgccagccagtgctgacccccgtgtctgtaaggaaggtggctcgctcggggagcacgctggtggtgcccagagcgcgctaccaccccagcatcgtttaaagccggtctctgtatggttcttgcagatatggccctcacttgtcgcctccgcttcccggtgccgggataccgaggaagaactcaccgccgcagaggcatggcgggcagcggtctccgcggcggccgtcgccatcgccggcgcgcaaaaagcaggcgcatgcgcggcggtgtgctgcctctgctaatcccgctaatcgccgcggcgatcggtgccgtacccgggatcgcctccgtggccctgcaggcgtcccagaaacgttgactcttgcaaccttgcaagcttgcatttttttggaggaaaaataaaaaagtctagactctcacgctcgcttggtcctgtgactattttgtagaaaaaagatggaagacatcaactttgcgtcgctggccccgcgtcatggctcgcgcccgttcatgggagactggacagatatcggcaccagcagtatgagcggtggcgccttcagctggggcagtctgtggagcggccttaaaaattttggttccaccattaaaaactatggcaacaaagcgtggaacagcagcacgggccagatgctaagagacaagttgaaagagcagaacttccaggagaaggtggcgcagggcctggcctctggcatcagcggggtggtggacatagctaaccaggccgtgcagaaaaagataaacagtcatctggacccccgccctcaggtggaggaaacgcctccagccatggagacggtgtttcccgagggcaaaggcgaaaagcgcccgcggcccgacagggaagagaccctggtgtcacacaccgaggagccgccctcttacgaggaggcactcaaggccggcctgcccaccactcgccccgtagctcccatggccacaggtgtggtgggccataaacaacacacccccgcaacactagatctgcccccgccgtccgagccgccgcgtcagccaaagacggcgacggtgcccgctccctccacttccgccgccaacagagtgtccctgcgccgcactacgggcgcccctcggggaccgcgactgagcggcaactggcagagcacactgaacagcattgtgggcctgggagtgaaaagtgtgaagcgccgccgttgctactgaatgagcaagctagctaacgtgttatatgtgtgtatgcgtcctatgtcgccgccagaggagctgttgagccgcccgcgccgtctgcactccagcgaatttcaagatggcgaccccttcgatgatgccacagtggtcgtacatgcacatctcgggccaggacgcctcggagtacctgagccccgggctggtgcagttcgcccgcgccaccgacagctacttcagcctaagtaacaaatttaggaaccctacggtggcacccacccacgatgtgaccacggaccggtcgcagcgcctgacgctgcggtttatccccgtggatcgggaggacactgcctactcttacaaggcgcgcttcacgctagccgtgggcgacaaccgcgtgctggacatggcctccacctactttgatatccggggtgtgctggacaggggtcccacctttaagccctactcgggcactgcctacaactccctggctcctaaaggcgctcccaattcttgcgagtgggatgaaaaaactaatactgctgaagcagccattgaaaatgaagaagagctggcggatgagccagaagagcaagcagaagaggctataaaaaccaatgtgtttgcccaggcgccatattctggcaatgcaatttccaaagaaggaatacaagtaggcatagaaggcattggagagcaagtaaaagccgtatacgcagacaaaacctaccagccggaacctcaggttggagaaactcaatggaatgagactgaaataaatcatggagcaggaagggtgctgaagaagaccactcccatgaagccttgctatggttcttatgctaaacctactaatgaatatggaggccagggcatccttgtagaaaaaaatggcaaaatggaaagccaggtggaaacacagttttttgctcttgacggtgaaaatgataatagtccaaaagtggtgttgtatagcgaagatgtaaacttggatactcctgacacacacctatcatacaaacctagcgcccaagatgtaaactctaaagaaatgttgggccaacaggccatgcccaacaggccaaatcttattgcttttagggacaactttattggacttatgtactacaacagcactggcaacatgggagtgctggcaggacaggcctcccaactaaatgccgtggtagacttgcaagacagaaacacagagttgtcataccagctgatgcttgattccattggagacagatcaagatattttgccatgtggaaccaggcggttgatagttacgatccagatgttagaattattgaaaaccatggcacagaggatgaacttccaaactactgttttcctttgggaggaatatttaatactcagagttttaaaaaggtaaaacctggaacggataacggatgggaaacagatgatgacttttcagataaaaatgaaataagagttggcaacaactttgccatggagatcaatatccaggcaaacctgtggagaagcttcttgtattccaatgtggctctctacctgccagataagatgaagtactctccaaccaacatagacatttccaccaacactaacacctatgactacatgaacaaaagagtggcgcctccaggcctggtggactgctatgtcaatctgggggccaggtggtcccttgatgtaatggataacatgaacccctttaaccaccaccgcaatgcgggcctgcgataccgttccatgcttctgggtaacggccgctacgtgcccttccacatccaggtgccccaaaagttctttgccatcaaaagccttctactcttgcctggctcgtacacctacgaatggaatttcagaaaggatgtgaacatggtcctacagagctctctgggcaacgaccttagggtggatggggccagcatcaagtttgacagcatcaccctttatgctacctttttccccatggcccacaacaccgcttccacgcttgaggccatgctcagaaacgacaccaacgaccagtccttcaatgactacctctctggggccaacatgctctaccccatccccgccaacgctaccaacgtgcccatctccattccctctcgcaactgggccgccttcagaggctgggcatttacccgccttaagaccaaggagaccccctccctgggctcgggttttgacccctactttgtctactcgggatccatcccctacctggatggcaccttctacctcaaccacacttttaagaagatatccatcatgtatgactcctctgtcagctggccgggcaacgaccgcctgctcacccccaatgagttcgaggtcaagcgcgccgtggacggcgagggctacaacgtggcccagtgcaacatgaccaaggactggttcctggtgcagatgctggccaactacaacataggctaccagggcttctacatcccagagagctacaaggacaggatgtactccttcttcagaaatttccaacccatgagcaggcaggtggtggacgagaccaaatacaaggactatcaggccgttggcatcactcaccagcacaacaactcgggattcgtgggctacctggcacccaccatgcgcgagggacaggcctaccccgccaacttcccctaccccttgataggcaagaccgcggtcgacagcgtcacccagaaaaagttcctctgcgaccgcaccctctggcgcatccccttttctagcaacttcatgtccatgggcgcgctcacggacctgggccagaacctgctctatgccaactccgcccatgcgctggacatgacttttgaggtggaccccatggacgagcccacccttctctatattgtgtttgaagtgttcgacgtggtcagagtgcaccagccgcaccgcggtgtcatcgagaccgtgtacctgcgcacgcccttctcggccggcaacgccaccacctaaggagacagcgccgccgcctgcatgacgggttccaccgagcaagagctcagggccatcgccagagacctgggatgcggaccctattttttgggcacctatgacaaacgcttcccgggcttcatctcccgagacaagctcgcctgcgccatcgtcaacacggccgcgcgcgagaccgggggcgtgcactggctggcctttggctgggacccgcgctccaaaacttgctacctctttgacccttttggcttctccgatcagcgcctcaagcagatctatgagtttgagtacgaggggctgctgcgccgcagcgcgcttgcctcctcgcccgaccgctgcatcacccttgagaagtccaccgagaccgtgcaggggccccactcggccgcctgcggtctcttctgctgcatgtttttgcacgcctttgtgcgctggccccagagtcccatggatcgcaaccccaccatgaacttgctcaagggagtgcccaacgccatgctccagagcccccaggtccagcccaccctgcgccacaaccaggaacagctctaccgcttcctggagcgccactccccctacttccgcagtcacagcgcgcgcatccggggggccacctctttctgccacttgcaagaaaacatgcaagacggaaaatgatgtacagctcgctttttaataaatgtaaagactgtgcactttatttatacacgggctctttctggttatttattcaacaccgccgtcgccatctagaaatcgaaagggttctgccgcgcgtcgccgtgcgccacgggcagagacacgttgcgatactggaagcggctcgcccacttgaactcgggcaccaccatgcggggcagtggttcctcggggaagttctcgccccacagggtgcgggtcagctgcagcgcgctcaggaggtcgggagccgagatcttgaagtcgcagttggggccggaaccctgcgcgcgcgagttgcggtacacggggttgcagcactggaacaccagcagggccggattatgcacgctggccagcaggctctcgtcgctgatcatgtcgctgtccagatcctccgcgttgctcagggcgaatggggtcatcttgcagacctgcctgcccaggaaaggcggcagcccgggcttgccgttgcagtcgcagcgcaggggcatcagcaggtgcccgcggcccgactgcgcctgcgggtacagcgcgcgcatgaaggcttcgatctgcctgaaagccacctgcgccttggctccctccgaaaagaacatcccacaggacttgctggagaactggttcgcgggacagctggcatcgtgcaggcagcagcgcgcgtcggtgttggcgatctgcaccacgttgcgaccccaccggttcttcactatcttggccttggaagcctgctccttcagcgcgcgctggccgttctcgctggtcacatccatctctatcacctgctccttgttgatcatgtttgtcccgtgcagacacttcaggtcgccctccgtctgggtgcagcggtgctcccacagcgcgcaaccggtgggctcccaattcttgtgggtcacccccgcgtaggcctgcaggtaggcctgcaagaagcgccccatcatggccacgaaggtcttctggctcgtaaaggtcagctgcaggccgcgatgctcttcgttcagccaggtcttgcagatggcggccagcgcctcggtctgctcgggcagcatcctaaaatttgtcttcaggtcgttatccacgtggtacttgtccatcatggcgcgcgccgcctccatgcccttctcccaggcggacaccatgggcaggcttagggggtttatcacttccaccggcgaggacaccgtactttcgatttcttcttcctccccctcttcccggcgcgcgcccacgctgctgcgcgctctcaccgcctgcaccaaggggtcgtcttcaggcaagcgccgcaccgagcgcttgccgcccttgacctgcttaatcagcaccggcgggttgctgaagcccaccatggtcagcgccgcctgctcttcttcgtcttcgctgtctaccactatctctggggaagggcttctccgctctgcggcggtgcgcttcttttttttcttgggagcagccgtgacggagtccgccacggcgacggaggtcgagggcgtggggctgggggtgcgcggtaccagggcctcgtcgccctcggactcttcctctgactccaggcggcggcggagtcgcttctttgggggcgcgcgcgtcagcggcggcggagacggggacggggacggggacgggacgccctccacagggggtggtcttcgcgcagacccgcggccgcgctcgggggtcctctcgagctggtcttggtctcgactggccattgtatcctcctcctcctaggcagagagacataaggagtctatcatgcaagtcgagaaggaggagagcttaaccaccccctctgacaccgccgatgcgcccgccgtcgccgtcgcccccgctgccgccgacgcgcccgccacaccgagcgacacccccgcggacccccccgccgacgcacccctgttcgaggaagcggccgtggagcaggacccgggctttgtctcggcagaggaggatttgcgagaggaggagaataaggagaagaagccctcagtgccaaaagatgataaagagcaagacgagcacgacgcagatgcacaccagggtgaagtcgggcggggggacggagggcatggcggcgccgactacctagacgaagggaacgacgtgctcttgaagcacctgcatcgtcagtgcgccatcgtttgcgacgctctgcaggagcgcagcgaagtgcccctcagcgtggcggaggtcagccacgcctacgagctcagcctcttctccccccgggtgcccccccgccgccgcgaaaacggcacatgcgagcccaacccgcgcctcaacttctaccccgccttcgtggtgcccgaggtcctggccacctatcacatcttctttcaaaattgcaagatccccctctcgtgccgcgccaaccgtagccgcgccgataagatgctggccctgcgccagggcgaccacatacctgatatcgccgctttggaagatgtgccaaagatctttgagggtctgggtcgcaacgagaagcgggcagcaaactctctgcaacaggaaaacagcgaaaatgagagtcacaccggggtactggtggagctcgagggcgacaacgcccgcctggcggtggtcaagcgcagcatcgaggtcacccactttgcctaccccgcgctaaacctgccccccaaagtcatgaacgcggccatggacgggctgatcatgcgccgcggccggcccctcgctccagatgcaaacttgcatgaggagaccgaggacggccagcccgtggtcagcgacgagcagctggcgcgctggctggagaccgcggaccccgccgaactggaggagcggcgcaagatgatgatggccgcggtgctggtcaccgtagagctggagtgtctgcagcgcttcttcggcgaccccgagatgcagagaaaggtcgaggagaccctgcactacaccttccgccagggctacgtgcgccaggcttgcaagatctccaacgtggagctcagcaacctggtgtcctacctgggcatcttgcatgagaaccgcctcgggcagagcgtgctgcactccaccctgcgcggggaggcgcgccgcgactacgtgcgcgactgcgtttacctcttcctctgctacacctggcagacggccatgggggtctggcagcagtgtctggaggagcgcaacctcaaagagctggagaagctcctgcagcgcgcgctcaaagacctctggacgggctacaacgagcgctcggtggccgccgcgctggccgacctcatcttccccgagcgcctgctcaaaaccctccagcaggggctgcccgacttcaccagccaaagcatgttgcaaaacttcaggaactttatcctggagcgttctggcatcctacccgccacctgctgcgccctgcccagcgactttgtccccctcgtgtaccgcgagtgccccccgccgctgtggggtcactgctacctgttccaactggccaactacctgtcctaccacgcggacctcatggaggactccagcggcgaggggctcatggagtgccactgccgctgcaacctctgcacgccccaccgctccctggtctgcaacacccaactgctcagcgagagtcagattatcggtaccttcgagctacagggtccgtcctcctcagacgagaagtccgcggctccggggctaaaactcactccggggctgtggacttccgcctacctgcgcaaatttgtacctgaagactaccacgcccacgagatcaggttttacgaggaccaatcccgcccgcccaaggcggagctgaccgcctgcgtcatcacccagggcgagatcctaggccaattgcaagccatccaaaaagcccgccaagattttttgctgaagaagggtcggggggtgtatctggacccccagtcgggtgaggagctcaacccggttcccccgctgccgccgccgcgggaccttgcttcccaggataagcatcgccatggctcccagaaagaagcagcagcggccgccactgccgccaccccacatgctggaggaagaggaggaatactgggacagtcaggcagaggaggtttcggacgaggaggagccggagacggagatggaagagtgggaggaggacagcttagacgaggaggcttccgaagccgaagaggcagacgcaacaccgtcaccctcggccgcagccccctcgcaggcgcccccgaagtccgctcccagcatcagcagcaacagcagcgctataacctccgctcctccaccgccgcgacccacggccgaccgcagacccaaccgtagatgggacaccaccggaaccggggccggtaagtcctccgggagaggcaagcaagcgcagcgccaaggctaccgctcgtggcgcgctcacaagaacgccatagtcgcttgcttgcaagactgcggggggaacatctccttcgcccgccgcttcctgctcttccaccacggtgtggccttcccccgtaacgtcctgcattactaccgtcatctctacagcccctactgcggcggcagtgagccagagacggtcggcggcggcggcgcccgtttcggcgcctaggaagacccagggcaagacttcagccaagaaactcgcggcggccgcggcgaacgcggtcgcgggggccctgcgcctgacggtgaacgaacccctgtcgacccgcgaactgaggaaccgaatcttccccactctctatgccatcttccagcagagcagagggcaggatcaggaactgaaagtaaaaaacaggtctctgcgctccctcacccgcagctgtctgtatcacaagagcgaagaccagcttcggcgcacgctggaggacgctgaggcactcttcagcaaatactgcgcgctcactcttaaggactagctccgcgcccttctcgaatttaggcgggaacgcctacgtcatcgcagcgccgccgtcatgagcaaggacattcccacgccatacatgtggagctatcagccgcagatgggactcgcggcgggcgcctcccaagactactccacccgcatgaactggctcagtgccggcccacacatgatctcacaggttaatgatatccgcacccatcgaaaccaaatattggtggagcaggcggcgattaccaccacgccccgcaataatcccaaccccagggagtggcccgcgtccctggtgtatcaggaaattcccggccccaccaccgtactacttccgcgtgattcccaggccgaagtccaaatgactaactcaggggcgcagctcgcgggcggctgtcgtcacagggtgcggccccctcgccagggtataactcacctggagatccgaggcagaggtattcagctcaacgacgagtcggtgagctcctcgctcggtctcagacctgacgggaccttccagatagccggagccggccgatcttccttcacgccccgccaggcgtacctgactctgcagagctcgtcctcggcgccgcgctcgggcggcatcgggactctccagttcgtgcaggagtttgtgccctcggtctacttcaaccccttctccggctctcccggtcgctacccggaccagttcatctcgaactttgacgccgcgagggactcggtggacggctacgactgaatgtcgggtggacccggtgcagagcaacttcgcctgaagcacctcgaccactgccgccgccctcagtgctttgcccgctgtcagaccggtgagttccagtacttttccctgcccgactcgcacccggacggcccggcgcacggggtgcgctttttcatcccgagtcaggtgcgctctaccctaatcagggagtttaccgcccgtcccctactggcggagttggaaaaggggccttctatcctaaccattgcctgcatctgctctaaccctggattgcaccaagatctttgctgtcatttgtgtgctgagtataataaaggctgagatcagaatctactcgggctcctgtcgccatcctgtcaacgccaccgtccaagcccggcccgatcagcccgaggtgaacctcacctgcggtctgcaccggcgcctgagaaaatacctagcttggtactacaacagcactccctttgtggtttacaacagctttgaccaggacggggtctcactgagggataacctctcgaacctgagctactccatcaggaagaacagcaccctcgagctacttcctccttacctgcccgggacttaccagtgtgtcaccggtccctgcacccacacccacctgttgatcgtaaacgactctcttccgagaacagacctcaataactcctcttcgcagttccccagaacaggaggtgagctcaggaaaccccgggtaaagaagggtggacaagagttaacacttgtggggtttctggtgtatgtgacgctggtggtggctcttttgattaaggcttttccttccatgtctgaactctccctcttcttttatgaacaactcgactagtgctaacgggaccctacccaacgaatcgggattgaatatcggtaaccaggttgcagtttcacttttgattaccttcatagtcctcttcctgctagtgctgtcgcttctgtgcctgcggatcgggggctgctgcatccacgtttatatctggtgctggctgtttagaaggttcggagaccatcgcaggtagaataaacatgctgctgcttaccctctttgtcctggcgctggccgccagctgccaagccttttccgaggctgattttatagaaccccagtgcaatatcacttataaatctgaatataacctctgcactatcctaattaaatgcgttactcaacacgatgaggtaactgttagatacaaagatcaatcaaaaagagacgcactttacagcagctggcaaccaggagatgaacaaaaatacaatgtgaccgtcttccagggcaaactctccaaaacttacaattacactttcccattcgaggagatgtgtgagtttgtcatgttcatgtcaaagcagtacaagatgtggcctccgactccccagggctgtgtggaaaatccaggctctttctgcatgatctctctctgtgtaactgtgctggcactaatactcacgcttttgtatatcagatttaaatcaaggcaaagcttcatcgatgaaaagaaaatgccttaatcgcttttcacgcttgattgctaacaccgggtttttatccgcagaatgattggaatcaccctactaatcacctccctccttgcgattgcccatgggttggaacgaatcgaagtccctgtgggggccaatgttaccctggtggggcctgtcggcaatgctacattaatgtgggaaaaatatactaaaaatcaatgggtctcttactgcactaacaaaaacagccacaagcccagagccatctgcgatgggcaaaatttaaccttgattgatgttcaattgctggatgcgggctactattatgggcagctgggtacaatcgttaattactggagaccccacaaagattacatgcttcacgtagtaaagggtccccttagcagcccgaccactaccaccacctctaccacacccactaccaccactactcccatcaccagcactgccacccagcctcctcatagcagaacaaccacttttatcaattccaagtcccactccccccacattgccggcgggccctccgcctcaaactccgagaccaccgagatctgcttctgcaaatgctctgacgccattgcccaggatttggaagaccacgaggaagatgagcatgacttcgcagatgcatgccaggcatcaggggcagaagcactgccggtggccctcaaacagtatgcagactcccataccacccccgatcttccaccgccttcccagaagccaagtttcctgggggaaaatgaaacactgcctctctccatacttgctttgacatctgttgctattctgactgctctgctggtgctcctatgctctatatgctacctgatctgctgcaggaagaaaaaatctcacggccatgctcaccagccgcttatgcacttcccttaccctccagagttgggcgaccacaaactttaagtctgcagtagctatctgcccatcccttgtcagtcgacagcgatgagccccactaatctaacggcctctggacttacaacattgtctcttaatgagaccaccgctcctcaagacctgtacgatggtgtctccgcgctggttaaccagtgggatcacctgggcatatggtggctcctcataggagcagtgaccctgtgcctaatcctggtctggataatctgctgcatcaaaagcagaagacccaggcggcggcccatctacaggcccttcgtcatcacacctgaagatgatgatggcaccacgtccaggctgcagagcctaaagcagctactcttctcttttacagcatggtaaattgaacatgcctcgcattttcatctacttgtttcttcttccactctttttgggctcttctacattggcagctgtgtcccacatcgaggtagactgcatctcgcccttctcagtctacttactcttcggctttgtcatttgcaactttgtctgcagcgttatcactgtagtgatctgcttcatacagtgcatcgactacgtctgcgtacgggtggcctattttagacaccacccccagtatcgcaacagggacatagcggctctcctaagacttgtttaaatcatgcccaaattaactgtgattgctcttctgattatctgctgcgtcctagccgcgattgggactcagcctactaccaccaccaccagcgctcccagaaagagacatgtttcctgcagcttcaaacgtccctggaatataccccaatgctttactgatgaacctgaaatctctttggcttggtacttcagcgtcaccgcccttctcatcttctgcagtacggttattgcccttgccatttacccttcccttgacctgggctggaatgctgtcaactctatggaatatcccaccttcccagaaccagacctgccagacctggttgttctaaacgcgtttcctcctcctcccgttcaaaatcagtttcgccctccgtccccgacgcccactgaggtcagctactttaatctaacaggcggagatgactgaaaacctagacctagaaatggacggcctctgcagcgaacaacgcatactagagaggcgccggcaaaaagcagagctcgagcgtcttaaacaagagctccaagacgcggtggccatacaccagtgcaaaaaaggtgtcttctgtctagtgaaacaggccacgctcacctatgaaaaaacaggtgacacccaccgcctaggatacaagctgcccacacaacgccagaagttcgcccttatgataggcgaacaacccatcaccgtcacccagcactctgtggagacagaaggctgcatacacgctccctgcaggggcgctgactgtctctacaccttgatcaaaaccctctgcggccttagagacctcatccctttcaattgatcataactgtaatcaataaaaaatcacttacttgaaatctgatagcaagcctctgtccaattttttcagcaacacttccttcccctcctcccaactctggtactctaggcgcctcctagctgcaaacttcctccacagtctgaagggaatgtcagattcctcctcctgtccctccgcacccacgatcttcatgttgttgcagatgaaacgcgcgagatcgtctgacgagaccttcaaccccgtgtacccctacgataccgagatcgctccgacttctgtcccttttcccacccctccctttgtgtcccccgcaggaatgcaagaaaacccccctggagtgctatccctacgccttgcagaacccttgaccacctccaatggagcgctgaccctaaaaatggggggtggtttgaccctggacgaagaaggaaagcttacttcccaaaatattaccagtgttgatcctcctcttaaaaaaacaaaaaacaatatcagtctgcagactgcctccccccttgccgtcagctcgggagccctcacacttttcgctactcctcccctggcagttaatgacaataacctaactgtgcagtctcaggctccccttacactggaaaactcaaaactaagtctggccaccaaaggccccctaaccgtttctgaaggaaaacttgccctagaaacagaggctcccttgcatgcaagcgacagcagtagcctaggccttagtgtaacggccccactgagcattagcagcgacagcctaggactagacttgcaagcgcccattatttctgaaaatggaaaactgggcctaagagtaacaggtcccctaactgtggccagcagtattgatgctttgacagtagccacaggcagcggtattggacttgatagcaacacgcgcctacaggcaaaattggtcgcgcccctaggctttgacaccaatggcaacattaagctcagcacttcgggcggcatgagactgaacaatggcacacttatactagatgtaaactacccatttgaggctcaaggtcaacttagtctaagagtgggttcgggtccactgtatgtagactccaacacacataacctaaccgctagatgccttagagggctatacataacgtcatctaataaccaaaccggcctggaggccaacataaaacttacaaaaggacttgtgtttgatggaaatgccatagcagttaatgttagcaaagggctagaatacagtaccactgaaacagcgcagggtgtaaatcccatacagactaaaataggtttgggcatggaatatgataccaatggagccataaagccaagactaggctctggtttgagctttgataattcaggagctattgtagtgggaaacaaaaatgatgacactcttactctgtggactacaccagacccatctcccaactgtcagattaactcggaaaaagatgctaaactaaccttggtactaaccaagtgcggtagtcaaattgtaggcacagtatctgcctttgctcttaaaggcagccttgccccaattaatggcacagtgagctcagttagtatattcctaagatttaatgaaaatggggtactgatgagcaactcatcgttggaaagccaatactggaattacaggaatggaaattcaactaatgccacaccatatacaaatgcactaggttttatgcctaacctggcagcttatcccaaaggccaggcaacgactgcaaaaagcagcatcattagccaggtttacatgaatggtgacacttccaaacctatgatatttacaataacttttaatgggcttgaaacagaggaaactcaggtcagtacatattccatgacattttcatggaggtggacaaatggagactacgtggggcactattttaaaacaaactcctttactttctcctacattgcccaagaataaagaaagcacagagatgcttgtttttgatttcaaaattgtgtgcttttatttatttcaagcttacagtatttccagtagtcattcgaatagagcttaattaaactgcatgagaacccttccacatagcttaaattagcaccagtgcaaatggagaaaaatcaacatacctttttatccagatatcagagaactctagtggtcagttttcccccaccctcccagctcacagaatacacagtcctttccccccggctggctttaaacaacactatctcattggtaacagacatattcttaggtgtaataatccacacggtctcttggcgggccaaacgctggtcggtgatgttaataaactccccaggcagctctttcaagttcacgtcgctgtccaactgctgaagcgctcgcggctccgactgcgcctctagcggaggcaacggcaacacccgatccttgatctataaaggagtagagtcataatcccccataagaatagggcggtgatgcagcaacaaggcgcgcagcaactcctgccgccgcctctccgtacggcaggaatgcaacggcgtggtggtctcctccgcgataatccgcaccgctcgcagcatcagcatcctcgtcctccgggcacagcagcgcatcctgatctcactgagatcggcgcagtaagtgcagcacaaaaccaagatgttatttaagatcccacagtgcaaagcgctgtacccaaagctcatggcgggaaggacagcccccacgtgaccatcataccagatcctcaggtaaatcaaatgacgacctctcataaacacgctggacatgtacatcacctccttgggcatgtgctgattcaccacctctcgataccacaagcatcgctgattaattaaagacccctcgagcaccatcctgaaccaggaagccagcacctgaccccccgccaggcactgcagggaccccggtgaatcgcagtggcagtgaagactccagcgctcgtagccgtgaaccatagagctggtcattatatccaaattggcacaacacagacacactttcatacactttttcatgattagcagctcctctctagtcaggaccatatcccaaggaatcacccactcttgaatcaaggtaaatcccacacagcagggcaggcctctcacataactcacgttatgcatagtgagcgtgtcgcaatctggaaataccggatgatcttccatcaccgaagcccgggtctccgtctcaaagggaggtaaacggtccctcgtgtagggacagtggcgggataatcgagatcgtgttgaacgtagagtcatgccaaagggaacagcggacgtactcatatttcctccagcagaaccaagtgcgcgcgtggcagctatccctgcgtcttctgtctcgccgcctgccccgttcggtgtagtagttgtaatacagccactccctgagaccgtcaaggcgctccctggcgtccggatctatgacaacaccgtcctgcagcgccgccctgatgacatccaccaccgtagagtatgccaagcccagccaggaaatgcattcactttgacagcgagagataggaggagcggggagagatggaagaaccatgatagtaaagagaacttttattccaatcgatcttctaagatatcaaagtggagatctataagatgacactggtctcctccgctgagtcgatcaaaaataacagctaaaccacaaacaacacgattggtcaaatgctccacaagggcctgcagcataaaattgcctcggaactccaccgcaagcataacatcaaagccaccgcctctatcgtgatcaagaataaaaaccccacagctatccaccagacccatatagttttcatctctccatcgtgaaaaaagatttacaagctcctcctttaaatcacctccaaccaattgaaaaagttgaaccagaccgccctccaccttcattttcagcaagcgtatcatgattgcaaaaattcaggctcctcagacacctgtataagattgagaagcggaacgttaacatcgatgtttcgctcgcgtaaatcacgcctcagtgcaagcataatataatcccacaggtcggagcggatcagcgaggacacctccccgccaggaaccaactcaacggagcctatgctgattataatacgcatattcggagctatgctaaccagcacggcccccaaataggcgtactgcataggcggcgacaaaaagtgaacagtttgggttaaaaaatcaggcaaacactcgcgcaaaaaagcaagaacatcataaccatgctcatgcaaatagatgcaagtaagctcaggaacgaccacagaaaaatgcacaatttttctctcaaacatgactgcgagccctgcaaaaaataaaaaagaaacattacacaagagtagcctgtcttacgatgggatagactactctaaccaacataagacgggccacaacatcgcccgcgtggccataaaaaaaattgtccgtgtgattaaaaagaagcacagatagctggccagtcatatccggagtcatcacgtgtgaacccgtgtagacccccgggttggacacatcggccaaagaaagaaagcggccaatgtacccaggaggaattataacactaagacgaagatacaacagaataaccccatgagggggaataacaaagttagtaggtgaataaaaacgataaacacccgaaactccctcctgcgtaggcaaaatagcaccctccccttccaaaacaacatatagcgcttccacagcagccatgacaaaagactcaaaacactcaaaagactcagtcttaccaggaaaataaaagcactctcacagcaccagcactaatcagagtgtgaaaagggccaagtgccgaacgagtatatataggaataaaaaatgacgtaaatgtgtaaaggtcagaaaacgcccagaaaaatacacagaccaacgcccgaaacgaaaacccgcgaaaaaatacccagaacttcctcaacaaccgccacttccgctttctcacgatacgtcacttccgcaagaaaagcaaaactacatttcccacatgtgtaaaaacgaaaccccgccccttctaaccgcccacaacttacatcatcaaaacgtaaagtcctacgtcacccgccccgcctctccccgcccacctcattatcatattggccacaatccaaaataaggtatattat

SEQ ID NO: 54 - DNA, 37058 bp, Gorilla beringei graueri
ataatataccttattttggattgtggccaatatgataatgaggtgggcggggagaggcggggcgggtgacgtaggacgcgcgagtagggttgggaggtgtggcggaagtgtggcatttgcaagtgggaggagctcacatgcaagcttccgtcgcggaaaatgtgacgtttttgatgagcgccgcctacctccggaagtgccaattttcgcgcgcttttcaccggatatcgtagtaattttgggcgggaccatgtaagatttggccattttcgcgcgaaaagtgaaacggggaagtgaaaactgaataatagggcgttagtcatagcgcgtaatatttaccgagggccgagggactttgaccgattacgtggaggactcgcccaggtgttttttacgtgaatttccgcgttccgggtcaaagtctccgtttttattgtcaccgtcatttgacgcggagggtatttaaacccgctgcgctcctcaagaggccactcttgagtgccagcgagaagagttttctcctctgctccgcttcggtgatcgaaaaatgagacacatagcctgcactccgggtcttttgtccggtcgggcggcggccgagcttttggacgctttgatcaatgatgtcctgagcgatgattttccgtctactacccactttagcccacctactcttcacgaactgtacgatctggatgtactggtggatgtgaacgatcccaacgaggaggcggtttctgcgttttttcccgagtctgcgctgttggccgctcaggagggatttgacctacacactccgccgcctattttagagtctccgctgccggagcccagtggtataccttatatgcctgaactgcttcccgaagtggtagacctgacctgccacgagcctggctttccgcccagcgacgatgatggtgagccttttgttttagactttgctgagatacctgggcacggttgcaggtcttgtgcatatcatcagagggttaccggagaccccgaggttaagtgttcgctgtgctatatgaggatgacctcttcctttatctacagtaagtttttgtctaggtgggcttttgggtaggtgggttttgtgtcagaacaggtgtaaacgttgcttgtgttttttgtacctgtaggtccggtgtccgagccagacccggagcccgaccgcgatcccgagccggatcccgagcctcctcgcaggacaaggaaactaccttccattctgtgcaagtctcagacacctgtaaggaccagcgaggcagacagcaccgactctggcacttctacctctccccctgaaattcacccagtggttcctctgggtatacataaacctgttgctgttagagtttgcgggcgacgccctgcagtacagtgcattgaggacttgcttcacgatcccgaggaacctttggacttgagccttaaacgccctaggcaataaaccccacctaagtaataaaccccacctaagtaataaaccctgccgcccttggttattgagatgacgcccaatgtttgcttttgaatgacttcatgtgtgtaataaaagtgagtgtgatcataggtctcttgtttgtctgggcggggcttaagggtatataagtttctcggggctaaacttggttacacttgaccccaatggaggcgtgggggtgcttggaggagtttgcggacgtgcgccgtttgctggacgagagctctaaccatacctatactatttggaggtatctgtggggctctactcaggccaagttggtctccagaattaagcaggattacaagtgcgattttgaagagctttttagttcctgcggtgagcttttgcaatccttgaatctgggccatcaggctattttccaggaaaaggttctctcgactttggatttttccactcccgggcgcaccgccgcttgtgtggcttttgtgtcttttgtgcaagataaatggagcgaggagacccacctgagtcacggctacgtactggatttcatggcgatggctctttggagggctcacaacaaatggaagattcagaaggaactgtacggttccgccctacgtcgtccacttttgtcgcgacaggggctgaggtttcccgaccatcggcagcatcagaatctggaagacgagtcggaggagcgagcggaggagaagatcagcttgagagccggcctggaccctcctcaggaggaatgaatctcccgcaggtggttgacctgtttccagaactgagacgggtcctgactatcagggaggatggtcagtttgtgaagaagtttaagagggatcggggtgagggagatgatgaggcggctagcaatttagcttttagtctgatgactcgccaccgaccggaatgtattacctatcagcagattaaggagagttgtgccaacgagctggatcttttgggtcagaagtatagcatagaacagcttaccacttactggcttcagcctggggatgattgggaagaggcgatcagggtgtatgcaaaggtggccctgcggcccgattgcaagtataagattactaagttggttaatattagaaactgctgctatatttctgggaacggggccgaagtggagatagatactcaggacagggtggcttttaggtgttgcatgataaacatgtggcccgggatactggggatggatggggtggtgttcatgaatgtgaggtttacgggccccaactttaatggcacggtgttcatgggcaacaccaacttgctcctgcatggtgcgagtttctatgggtttaataacacctgtatagaggcctggaccgatgtaaaggttcgaggttgttccttttatagctgttggaaggcggtggtgtgtcgccctaaaagcaggggttctgtgaaaaaatgcttgtttgaaaggtgcaccttaggcatcctctctgagggcaactccagggtgcgccataatgtggcttcgaactgcggttgcttcatgcaagtgaagggggtgagcgttatcaagcataactcggtgtgtggaaactgcgaggatcgcgcctcccagatgctgacctgctttgatggtaactgtcacctgttgaagaccattcatataagcagccaccccagaaaggcctggcccgtgtttgagcataacatcctgacccgctgctccttgcatctgggggtcaggaggggtatgttcctgccttaccagtgtaactttagccacactaaaatcctgctggaacccgagtgtatgaccaaggtcagcctaaatggcgtgtttgatgcgactctgagaatctggaaggtgctgaggtatgatgagaccaggaccaggtgccgaccctgcgagtgcggcggcaagcacatgagaaatcagcctgtgatgttggatgtgaccgaggagcttaggcctgaccatctggtgctggcctgtaccagggccgagtttgggtctagcgatgaggataccgattgaggtgggtaaggtgggcgtggctagcagggtggggcgtgtataaattgggggtctaagggtctctctgttttgtcttgcaacagccgccgccatgagcgacaccggcaacagctttgatggaagcatctttagcccctatttgacagtgcgcatgcctcactgggctggagtgcgtcagaatgtgatgggttccaacgtggatggacgccccgttctgccttcaaattcgtctacaatggcctacgcgaccgtgggaggaactccgctggacgccgcgacctccgccgccgcctccgccgccgccgcgaccgcgcgcagcatggctacggacctttacagctctttggtggcgagcagcgcggcctctcgcgcgtctgctcgggatgagaaactgaccgctctgctgcttaaactggaagacttgacccgggagctgggtcaactgacccagcaggtctccagcttgcgtgagagcagccttgcctccccctaatggcccataatataaataaaagccagtctgtttggattaagcaagtgtatgttctttatttaactctccgcgcgcggtaagcccgggaccagcggtctcggtcgtttagggtgcggtggattctttccaacacgtggtacaggtggctctggatgtttagatacatgggcatgagtccatccctggggtggaggtagcaccactgcagagcttcgtgctcgggggtggtgttgtatatgatccagtcgtagcaggagcgctgggcgtggtgctgaaaaatgtccttaagcaagaggcttatagctagggggaggcccttggtgtaagtgtttacaaatctgctcagttgggaggggtgcatccggggggatataatgtgcatcttggactggatttttaggttggctatgttcccacccagatcccttctgggattcatgttgtgcaggaccaccagcacggtatatccagtgcacttgggaaatttatcgtggagcttagacgggaatgcatggaagaacttggagacgcccttgtggcctcccagattttccatacattcgtccatgatgatggcaatgggcccgtgggaagctgcctgagcaaaaatgtttctgggatcgctcacatcgtagttatgttccagggtgaggtcatcataagacatctttacaaatcgggggcggagggtcccggactggggtatgatggtaccctcgggccccggggcgtagttcccctcacagatctgcatctcccaggctttcatttcagagggagggatcatatccacctgcggagcgatgaaaaacacagtttctggcgcaggggagattaactgggatgagagcaggtttctgagcagctgtgactttccacagccggtgggcccatatatcacgcctatcaccggctgcagctggtagttaagagagctgcagctgccgtcctcccggagcaggggggccacctcgttcagcatatccctgacgtggatgttctccctgaccaattccgccagaaggcgctcgccgcccagcgaaagcagctcttgcaaggaagcaaaatttttcagcggttttaggccgtcggccgtgggcatgtttttcagcgtctgggtcagcagttccagcctgtcccacagctcggtgatgtgctctacggcatctcgatccagcagatctcctcgtttcgcgggttggggcggctttcgctgtagggcaccagccgatgggcgtccagcggggccagagtcatgtccttccatgggcgcagggtcctcgtcagggtggtctgggtcacggtgaaggggtgcgctccgggttgggcgctggccagggtgcgcttgaggctggttctgctggtgctgaatcgctgccgctcttcgccctgcgcgtcggccaggtagcatttgaccatggtctcgtagtcgagaccctcggcggcgtgccccttggcgcggagctttcccttggaggtggcgccgcacgaggggcactgcaggctcttcagggcgtagagcttgggagcgagaaacacggactctggggagtaggcgtccgcgccgcaggaagcgcagaccgtctcgcattccaccagccaagtgagctccgggcggtcagggtcaaaaaccaggttgcccccatgctttttgatgcgtttcttacctcggctctccatgaggcggtgtcccttctcggtgacgaagaggctgtccgtgtccccgtagaccgacttcaggggcctgtcttccagcggagtgcctctgtcctcctcgtagagaaactctgaccactctgagacgaaggcccgcgtccaggccaggacgaaggaggccacgtgggaggggtagcggtcgttgtccactagcgggtccaccttctccagggtgtgcaggcacatgtccccctcctccgcgtccagaaaagtgattggcttgtaggtgtaggacacgtgaccgggggttcccgacgggggggtataaaagggggtgggcgccctttcatcttcactctcttccgcatcgctgtctgcgagagccagctgctggggtaagtattccctctcgaaggcgggcatgacctcagcgctcaggttgtcagtttctaaaaatgaggaggatttgatgttcacctgtcctgaggtgatacctttgagggtacctgggtccatctggtcagaaaacactatttttttgttgtcaagcttggtggcgaacgacccgtagagggcgttggagagcagcttggcgatggagcgcagggtctggtttttgtcgcggtcggctcgctccttggccgcgatgttgagttgcacgtactcgcgggccacgcacttccactcggggaagacggtggtgcgctcgtctgggatcaggcgcaccctccagcctcggttgtgcagggtgaccatgtcgacgctggtggcgacctcgccgcgcaggcgctcgttggtccagcagaggcggccgcccttgcgcgagcagaaggggggtagggggtccagctggtcctcgtttggggggtccgcgtcgatggtgaagaccccggggagcaagcgcgggtcaaagtagtcgatcttgcaagcttgcatgtccagagcccgctgccattcgcgggcggcgagcgcgcgctcgtaggggttgaggggcgggccccagggcatggggtgggtgagcgcggaggcgtacatgccgcagatgtcatacacgtacaggggttccctgaggatgccgaggtaggtggggtagcagcgccccccgcggatgctggcgcgcacgtagtcatagagctcgtgggagggggccagcatgttgggcccgaggttggtgcgctgggggcgctcggcgcggaaggcgatctgcctgaagatggcatgggagttggaggagatggtgggccgctggaagacgttgaagcttgcttcttgcaagcccaccgagtccctgacgaaggaggcgtaggactcgcgcagcttgtgcaccagctcggcggtgacctggacgtcgagcgcgcagtagtcgagggtctcgcggatgatgtcatacttatcctcccccttctttttccacagctcgcggttgaggacgaactcttcgcggtctttccagtactcttggaggggaaacccgtccgtgtccgaacggtaagagcctagcatgtagaactggttgacggcctggtaggggcaacagcccttctccacgggcagcgcgtaggcctgcgccgccttgcggagggaggtgtgggtgagggcgaaagtgtccctgaccatgactttgaggtattgatgtttgaagtctgtgtcatcgcagccgccctgttcccacagggtgtagtccgtgcgctttttggagcgcgggttgggcagggagaaggtgaggtcattgaagaggatcttccccgctcgaggcatgaagtttctggtgatgcgaaagggccctgggaccgaggagcggttgttgatgacctgggcggccaggacgatctcgtcaaagccgtttatgttgtggcccacgatgtagagctccaaaaagcggggctggcccttgatggaggggagctttttgagttcctcgtaggtgagctcctcgggcgattccaggccgtgctcctccagggcccagtcttgcaagtgagggttggccgccaggaaggatcgccagaggtcgcgggccatgagggtctgcaggcggtcgcggaaggttctgaactgtcgccccacggccatcttttcgggggtgatgcagtagaaggtgagggggtctttctcccaggggtcccatctgagctctcgggcgaggtcgcgcgcggcggcgaccagagcctcgtcgccccccagtttcatgaccagcatgaagggcacgagctgcttgccaaaggctcccatccaagtgtaggtctctacatcgtaggtgacaaagaggcgctccgtgcgaggatgagagccgatcgggaagaactggatctcccgccaccagttggaggattggctgttgatgtggtgaaagtagaagtcccgtctgcgggccgagcactcgtgctggcttttgtaaaagcgaccgcagtactggcagcgctgcacgggttgtatatcttgcacgaggtgaacctggcgacctctgacgaggaagcgcagcgggaatctaagtcccccgcctggggtcccgtgtggctggtggtcttctactttggttgtctggccgccagcatctgtctcctggagggcgatggtggagcagaccaccacgccgcgagagccgcaggtccagatctcggcgctcggcgggcggagtttgatgacgacatcgcgcacattggagctgtccatggtctccagctcccgcggcggcaggtcagctgggagttcctggaggttcacctcgcagagacgggtcaaggcgcgggcagtgttgagatggtatctgatttcaaggggcgtgttggcggcggagtcgatggcttgcaggaggccgcagccccggggggccacgatggttccccgcggggcgcgaggggaggcggaagctgggggtgtgttcagaagcggtgacgcgggcgggcccccggaggtagggggggttccggccccacgggcatgggcggcaggggcacgtcttcgccgcgcgcgggcaggggctggtgctggctccgaagagcgcttgcgtgcgcgacgacgcgacggttggtgtcctgtatctggcgcctctgagtgaagaccacgggtcccgtgaccttgaacctgaaagagagttcgacagaatcaatctcggcatcgttgacagcggcctggcgcaggatctcctgcacgtcgcccgagttgtcctggtaggcgatctctgccatgaactgctcgatctcttcctcctggagatctcctcgtccggcgcgctccacggtggccgccaggtcgttggagatgcgacccatgagctgcgagaaggcgttgagcccgccctcgttccagacccggctgtagaccacgcccccctcggcgtcgcgggcgcgcatgaccacctgggccaggttgagctccacgtgtcgcgtgaagacggcgtagttgcgcaggcgctggaaaaggtagttcagggtggtggcggtgtgctcggcgacgaagaagtacatgacccagcgccgcaacgtggattcattgatgtcccccaaggcctccaggcgctccatggcctcgtagaagtccacggcgaagttgaaaaactgggagttgcgagcggacacggtcaactcctcctccagaagacggatgagctcggcgacagtgtcgcgcacctcgcgctcgaaggccacggggggcgcttcttcctcttccacctcttcttccatgatcgcttcttcttcttcctcagccgggacgggagggggcggcggcggcgggggaggggcgcggcggcggcggcggcgcaccgggaggcggtcgatgaagcgctcgatcatctccccccgcatgcggcgcatggtctcggtgacggcgcggccgttctcccgggggcgcagctcgaagacgccgcctctcatctcgccgcggggcgggcggccgtgaggtagcgagacggcgctgactatgcatcttaacaattgctgtgtaggtacgccgccgagggacctgattgagtccagatccaccggatccgaaaacctttggaggaaagcgtctatccagtcgcagtcgcaaggtaggctgagcaccgtggcgggcgggggcgggtctggagagttcctggcggagatgctgctgatgatgtaattaaagtaggcggtcttgagaaggcggatggtggacaggagcaccatgtctttgggtccggcctgttggatgcggaggcggtcggccatgccccaggcctcgttctgacaccggcgcaggtctttgtagtagtcttgcatgagtctttccaccggcacctcttctccttcctcttctccatctcgccggtggtttctcgcgccgcccatgcgcgtgaccccaaagcccctgagcggctgcagcagggccaggtcggcgaccacgcgctcggccaagatggcctgctgcacctgagtgagggtcctctcgaagtcatccatgtccacgaagcggtggtaggcgcccgtgttgatggtgtaggtgcagttggccatgacggaccagttgacggtctggtgtcccggctgcgagagctccgtgtaccgcaggcgcgagaaggcgcgggaatcgaacacgtagtcgttgcaagtccgcaccagatactggtagcccaccaggaagtgcggcggaggttggcgatagaggggccagcgctgggtggcgggggcgccgggcgccaggtcttccagcataaggcggtggtatccgtagatgtacctggacatccaggtgatgccggcggcggtggtggtggcgcgcgcgtagtcgcggacccggttccagatgtttcgcaggggcaagaagtgttccatggtcggcacgctctggccggtgaggcgcgcgcagtcgttgacgctctatacacacacaaaaacgaaagcgtttacagggctttcgttctgtagcctggaggaaagtaaatgggttgggttgcggtgtgccccggttcgagaccaagctgagctcggccggctgaagccgcagctaacgtggtattggcagtcccgtctcgacccaggccctgtatcctccaggatacggtcgagagcccttttgctttcttggccaagcgcccgtggcgcgatctgggatagatggtcgcgatgagaggacaaaagcggctcgcttccgtagtctggagaaacaatcgccagggttgcgttgcggcgtaccccggttcgagcccctatggcggcttggatcggccggaaccgcggctaacgagggccgtggcagccccgtcctcaggaccccgccagccgacttctccagttacgggagcgagccccttttgtttttttattttttagatgcatcccgtgctgcggcagatgcgcccctcgccccggcccgatcagcagcagcaacagcaggcatgcagacccccctctcccctttccgccccggtcaccacggccgcggcggccgtgtcgggcgcggggggcgcgctggagtcagatgagccaccgcggcggcgacctaggcagtatctggacttggaagagggcgagggactggcgcggctgggggcgaactctccagagcgccacccgcgggtgcagttgaaaagggacgcgcgcgaggcgtacctgccgcggcagaacctgtttcgcgaccgcgggggcgaggagcccgaggagatgcgagactgcaggttccaagcggggcgcgagctgcggcgcgggctggacagacagcgcctgctgcgcgaggaggactttgagcccgacacgcagacgggcatcagccccgcgcgcgcgcacgtagccgcggccgacctggtgaccgcctacgagcagacggtgaaccaggagcgcaacttccaaaagagcttcaacaaccacgtgcgcacgctggtggcgcgcgaggaggtgaccctgggtctcatgcatctgtgggacctggtggaggcgatcgtgcagaaccccagcagcaagcccctgaccgcgcagctgttcctggtggtgcagcacagcagggacaacgaggccttcagggaggcgctgctgaacatcaccgagccggaggggcgctggctcctggacctgataaacatcctgcagagcatagtggtgcaggagcgcagcctgagcctggccgagaaggtggcggccatcaactactctatgctgagcctgggcaagttctacgcccgcaagatctacaagaccccctacgtgcccatagacaaggaggtgaagatagacagcttctacatgcgcatggcgctgaaggtgctgaccctgagcgacgacctgggagtgtaccgcaacgagcgcatccacaaggccgtgagcgccagccggcggcgcgagctgagcgaccgcgagctgatgcacagtctgcagcgcgcgctgaccggcgcgggcgagggcgacagggaggtcgagtcctacttcgacatgggggccgacctgcactggcagccgagccgccgcgccctggaggcggcgggggcgtacggcggccccctggcggacgatgaccaggaagaggaggactatgagctagaggagggcgagtacctggaggactgacctggctggtggtgttttggtatagatgcaagatccgaacgtggcggacccggcggtccgggcggcgctgcagagccagccgtccggcattaactcctctgacgactgggccgcggccatgagtcgcatcatggccctgaccgcgcgcaaccccgaggctttcaggcagcagcctcaggccaaccggctggcggccatcttggaagcggtagtgcccgcgcgctccaaccccacccacgagaaggtgctggccatagtcaacgcgctggcggagagcagggccatccgcgcggacgaggccggactggtgtacgatgcgctgctgcagcgggtggcgcggtacaacagcggcaacgtgcagaccaacctggaccgcctggtgacggatgtgcgcgaggccgtggcgcagcgcgagcgcttgcatcaggacggtaacctgggctcgctggtggcgctaaacgccttcctcagcacccagccggccaacgtaccgcgggggcaggaggactacaccaactttttgagcgcgctgcggctgatggtgaccgaggtccctcagagcgaggtgtaccagtcggggcccgactacttcttccagaccagcagacagggcttgcaaaccgtgaacctgagccaggctttgaagaacctgcgggggctgtggggagtgaaggcgcccaccggcgaccgggctacggtgtccagcctgctaacccccaactcgcgcctgctgctgctgctgatcgcgcccttcacggacagcgggagcgtctcgcgggaaacctatctgggccacctgctgacgctgtaccgcgaggccatcgggcaggcgcaggtggacgagcacaccttccaagagatcaccagcgtgagccacgcgctggggcaggaggacacgggcagcctgcaggcgaccctgaactacctgctgaccaacaggcggcagaagattcccacgctgcacagcctgacgcaggaggaggagcgcatcttgcgctacgtgcagcagagcgtgagcctgaacctgatgcgcgacggcgtgacgcccagcgtggcgctggacatgaccgcgcgcaacatggaaccgggcatgtacgcctcccaccggccgttcattaaccgcctgatggactacttgcatcgggcggcggccgtgaaccccgagtacttcactaatgccattctgaatccccactggatgccccctccgggtttctacaacggggacttcgaggtgcccgaggttaacgacgggttcctctgggatgacatggatgacagtgtgttctcacccaacccgctgcgcgccgcgtctctgcgattgaaggagggttctgacagggaaggaccgaggagtctggcctcctccctggctctgggagcggtgggcgcggcggcgcggggcagtagccccttccccagcctggcagactctctgaacagcgggcgggtgagcaggccccgcttgctaggcgaggaggagtatctgaacaactccctgctgcagcccgcgagggacaaaaacgctcagcggcagcagtttcccaacaatgggatagagagcctggtggacaagatgtccagatggaagacgtatgcgcaggagtacaaggagtgggaggaccgccagccgcggcccctgccgccccctaggcagcgctggcagcggcgcgcgtccaaccgccgctggaggcaggggcccgaggacgatgatgactctgcagatgacagcagcgtgctggacctgggcgggagcgggaaccccttttcgcacctgcgcccccgcctgggcaagatgttttaaaagagaaaaaataaaaactcaccaaggccatggcgacgagcgttggttttttgttcccttccttagtatgcgacgcgcggcgatgttcgaggaggggcctcccccctcttacgagagcgcgatgggattttctcctgcgacgcccctacagcctccctacgtgcctcctcggtacctgcaacctaccgggggaagaaatagcatctgttactctgagctgcagcccctgtatgacaccaccaaagtgtacctggtggacaacaagtctgcggacgtggcctccctgaactaccagaacgaccacagcgattttttgaccaccgtgatccaaaacaatgacttcaccccaaacgaggccagcacccagaccataaacctggacaacaggtcgcactggggcggtgatctgaagaccatcttgcacaccaacatgcccaacgtgaatgagtttatgtttactaactcttttaaggcgcgggtaatggtggcgcgcgacgataagggagtgcctaaatacgagtgggtggactttacactgcccgagggcaactactccgagatcatgactcttgacctgatgaacaacgcgatcgtggagcactacttgaaagtaggcaggcagaacggggtaaaagaaagcgatattggagttaagtttgacaccaggaactttcgcctgggatgggaccccgagacggggttggttatgcccggggtttacactaatgaagcttttcaccccgatatagtgctcttgcccggatgcggggtggacttcacccaaagccggctgagcaacctgctgggcattcgaaagcgccagccattccaggaggggtttcaaatcacttatgagcatttggaagggggcaacattccggcgcttctggatttggtcgcctacgaggagagtttgaaatccgaggaaagcggggataacactgacaagggcggcgaggagcaagccggcgatggcgacactgcttcggtagaaaacgaaagtgcgtccgtggtggaggcggcggcggtagcgaccgcagagccggagaccgtagaggaggatatgaatgatagcgcaatcagaggagactcgtttattccccggggcgaagaaaagaaggcggaggctgcggcagcagtcgaagcagagcccaaagtcgagtcggagatcatggaggaggatttgaatgataacgcgatcagaggtgatacgtttgtgccgcggggcgaagaaaaaaaagcggaggcggaggccgcggctgaggaggcggccgaggctgtggcagccaccgcggcggtgactgaaacaactgaggagcaggttcaggccgagcaggttcaaaagaagcccgtgattaaagccctaacacaagatagcaaggagcgcagttacaacttgattcccggtagtactgacaccgagtaccgcagctggtacctggcatacaactacggcgacccggtcaaaggggtgcgctcgtggactctgctttgcacgccggacgtcacctgcggctccgagcagatgtactggtcgttgccaaacatgatgcaagacccggtgaccttccgctccacgcggcaggttaacaacttcccggtggtgggcgccgaactgctgcccgtgcactccaagagcttttacaacgagcaggccgtgtactcccagctgatccgccaggccacctctctgacccacgtgttcaatcgctttcccgagaaccagattttggcgcgcccgccggcccccaccatcactaccgtcagtgaaaacgttcctgctctcacagatcacgggacgctaccgctgcgcaacagcatctcaggagtccagcgagtgaccattactgacgccagacgccggacctgcccctacgtttacaaggccttgggcatagtctcgccgcgcgtcctctccagccgcactttttaaaacacatattcacccacgcttcaaagattatgtctatacttatctcacccagcaataacaccggctgggggctgcgcgcgcccagcaagatgtttggaggggcgagaaaacgttccgagcagcacccagtgcgcgtgcgcggccactaccgcgcgccctggggagcgcacaagcgcgggcgcgcagggcgcaccactgtggacgacgccattgactccgtagtggagcaggcgcgccactacacacccggcgcgccgtccgcccccgccgtgtccaccgtggacgaggcgatcgaaagcgtggtacagggcgcgcggcactatgccaaccttaaaaatcgccgccgtcgcgtggcccgccgccatcgccggagaccccgggccaccgccgccgcgcgccttgctaaggctctactcaggcgcgccaggcgaactggccgccgggccgccatgagggccgcacggcgggctgccgccagtgcggccgccgcggccccacgggcacgaaggcgcgcggccgctgccgccgccgccgccatttccagcttggcctcaacgcggcgcggtaacatatactgggtgcgcgactcgataaccggcacgcgggtacccgtgcgctttcgccccccgcggaattagcacaagacaacatacacactgagtctcctgctgttgtgtatcccagcggcgaccgtcagcagcggcgacatgtccaagcgcaaaattaaagaagagatgctccaggtcatcgcgccggagatctatgggcccccgaagaaggaggaggatgattacaagccccgcaagctaaagcgggtcaaaaagaaaaagaaagatgatgatgatgacgaggcggtggagtttgtccgccgcatggcacccaggcgccccgtgcagtggaagggtcggcgcgtgcagcgcgttttgcgccccggcaccgcggtggtcttcacgcccggcgagcgctccacgcgcactttcaagcgggtgtacgatgaggtgtacggcgacgaggacctgttggagcaggccaaccagcgctttggggagtttgcatatgggaaacggccccgcgagagtctaaaagaggacctgctggcgctaccgctggacgagggcaatcccaccccgagtctgaagccggtgaccctgcaacaggtgctgcctttgagcgcgcccagcgagcataagcgagggttgaagcgcgagggcggggacctggcgcccaccgtgcagttgatggtgcccaagcggcagaagctggaggacgtgctggagaaaatgaaagtagagcccgggatccagcccgagatcaaggtccgccccatcaagcaggtggcgcccggcgtgggagtccagaccgtggacgttaggattcccacggaggagatggaaacccaaaccgccactccctcttcagcggccagcgccaccaccggcaccgcttcggtagaggtgcagacggacccctggctacccgccgccgctgtcgccgccgccgccgccccccgttctcgcgggcgcaagagaaattatccagtggccagcgcgctcatgccccagtacgcactgcatccatccatcgcgcccacccccggctaccgcgggtattcgtaccgcccgcgcagatcggccggcactcgcggccgccgccgccgtgcgaccacaaccagccgccgccgtcgccgccgccgccagccagtgctgacccccgtgtctgtaaggaaggtggctcgctcggggagcacgctggtggtgcccagagcgcgctaccaccccagcatcgtttaaagccggtctctgtatggttcttgcagatatggccctcacttgtcgcctccgcttcccggtgccgggataccgaggaagaactcaccgccgcagaggcatggcgggcagcggtctccgcggcggccgtcgccatcgccggcgcgcaaaaagcaggcgcatgcgcggcggtgtgctgcctctgctaatcccgctaatcgccgcggcgatcggtgccgtacccgggatcgcctccgtggccctgcaggcgtcccagaaacgttgactcttgcaaccttgcaagcttgcatttttttggaggaaaaaataaaaaagtctagactctcacgctcgcttggtcctgtgactattttgtagaaaaaagatggaagacatcaactttgcgtcgctggccccgcgtcatggctcgcgcccgttcatgggagactggacagatatcggcaccagcagtatgagcggtggcgccttcagctggggcagtctgtggagcggccttaaaaattttggttccaccattaaaaactatggcaacaaagcgtggaacagcagcacgggccagatgctaagagacaagttgaaagagcagaacttccaggagaaggtggcgcagggcctggcctctggcatcagcggggtggtggacatagctaaccaggccgtgcagaaaaagataaacagtcatctggacccccgccctcaggtggaggaaacgcctccagccatggagacggtgtttcccgagggcaaaggcgaaaagcgcccgcggcccgacagggaagagaccctggtgtcacacaccgaggagccgccctcttacgaggaggcactcaaggccggcctgcccaccactcgccccgtagctcccatggccacaggtgtggtgggccataaacaacacacccccgcaacactagatctgcccccgccgtccgagccgccgcgtcagccaaagacggcgacggtgcccgctccctccacttccgccgccaacagagtgtccctgcgccgcactacgggcgcccctcggggaccgcgactgagcggcaactggcagagcacactgaacagcattgtgggcctgggagtgaaaagtgtgaagcgccgccgttgctactgaatgagcaagctagctaacgtgttatatgtgtgtatgcgtcctatgtcgccgccagaggagctgttgagccgcccgcgccgtctgcactccagcgaatttcaagatggcgaccccttcgatgatgccacagtggtcgtacatgcacatctcgggccaggacgcctcggagtacctgagccccgggctggtgcagttcgcccgcgccaccgacagctacttcagcctaagtaacaaatttaggaaccctacggtggcacccacccacgatgtgaccacggaccggtcgcagcgcctgacgctgcggtttatccccgtggatcgggaggacactgcctactcttacaaggcgcgcttcacgctagccgtgggcgacaaccgcgtgctggacatggcctccacctactttgatatccggggtgtgctggacaggggtcccacctttaagccctactcgggcactgcctacaactccctggctcctaaaggcgctcccaattcttgcgagtgggatgaaaaaactaatactgctgaagcagccattgaaaatgaagaagagctggcggatgagccagaagagcaagcagaagaggctataaaaaccaatgtgtttgcccaggcgccatattctggcaatgcaatttccaaagaaggaatacaagtaggcatagaaggcattggagagcaagtaaaagccgtatacgcagacaaaacctaccagccggaacctcaggttggagaaactcaatggaatgagactgaaataaatcatggagcaggaagggtgctgaagaagaccactcccatgaagccttgctatggttcttatgctaaacctactaatgaatatggaggccagggcatccttgtagaaaaaaatggcaaaatggaaagccaggtggaaacacagttttttgctcttgacggtgaaaatgataatagtccaaaagtggtgttgtatagcgaagatgtaaacttggatactcctgacacacacctatcatacaaacctagcgcccaagatgtaaactctaaagaaatgttgggccaacaggccatgcccaacaggccaaatcttattgcttttagggacaactttattggacttatgtactacaacagcactggcaacatgggagtgctggcaggacaggcctcccaactaaatgccgtggtagacttgcaagacagaaacacagagttgtcataccagctgatgcttgattccattggagacagatcaagatattttgccatgtggaaccaggcggttgatagttacgatccagatgttagaattattgaaaaccatggcacagaggatgaacttccaaactactgttttcctttgggaggaatatttaatactcagagttttaaaaaggtaaaacctggaacggataacggatgggaaacagatgatgacttttcagataaaaatgaaataagagttggcaacaactttgccatggagatcaatatccaggcaaacctgtggagaagcttcttgtattccaatgtggctctctacctgccagataagatgaagtactctccaaccaacatagacatttccaccaacactaacacctatgactacatgaacaaaagagtggcgcctccaggcctggtggactgctatgtcaatctgggggccaggtggtcccttgatgtaatggataacatgaacccctttaaccaccaccgcaatgcgggcctgcgataccgttccatgcttctgggtaacggccgctacgtgcccttccacatccaggtgccccaaaagttctttgccatcaaaagccttctactcttgcctggctcgtacacctacgaatggaatttcagaaaggatgtgaacatggtcctacagagctctctgggcaacgaccttagggtggatggggccagcatcaagtttgacagcatcaccctttatgctacctttttccccatggcccacaacaccgcttccacgcttgaggccatgctcagaaacgacaccaacgaccagtccttcaatgactacctctctggggccaacatgctctaccccatccccgccaacgctaccaacgtgcccatctccattccctctcgcaactgggccgccttcagaggctgggcatttacccgccttaagaccaaggagaccccctccctgggctcgggttttgacccctactttgtctactcgggatccatcccctacctggatggcaccttctacctcaaccacacttttaagaagatatccatcatgtatgactcctctgtcagctggccgggcaacgaccgcctgctcacccccaatgagttcgaggtcaagcgcgccgtggacggcgagggctacaacgtggcccagtgcaacatgaccaaggactggttcctggtgcagatgctggccaactacaacataggctaccagggcttctacatcccagagagctacaaggacaggatgtactccttcttcagaaatttccaacccatgagcaggcaggtggtggacgagaccaaatacaaggactatcaggccgttggcatcactcaccagcacaacaactcgggattcgtgggctacctggcacccaccatgcgcgagggacaggcctaccccgccaacttcccctaccccttgataggcaagaccgcggtcgacagcgtcacccagaaaaagttcctctgcgaccgcaccctctggcgcatccccttttctagcaacttcatgtccatgggcgcgctcacggacctgggccagaacctgctctatgccaactccgcccatgcgctggacatgacttttgaggtggaccccatggacgagcccacccttctctatattgtgtttgaagtgttcgacgtggtcagagtgcaccagccgcaccgcggtgtcatcgagaccgtgtacctgcgcacgcccttctcggccggcaacgccaccacctaaggagacagcgccgccgcctgcatgacgggttccaccgagcaagagctcagggccatcgccagagacctgggatgcggaccctattttttgggcacctatgacaaacgcttcccgggcttcatctcccgagacaagctcgcctgcgccatcgtcaacacggccgcgcgcgagaccgggggcgtgcactggctggcctttggctgggacccgcgctccaaaacttgctacctctttgacccttttggcttctccgatcagcgcctcaagcagatctatgagtttgagtacgaggggctgctgcgccgcagcgcgcttgcctcctcgcccgaccgctgcatcacccttgagaagtccaccgagaccgtgcaggggccccactcggccgcctgcggtctcttctgctgcatgtttttgcacgcctttgtgcgctggccccagagtcccatggatcgcaaccccaccatgaacttgctcaagggagtgcccaacgccatgctccagagcccccaggtccagcccaccctgcgccacaaccaggaacagctctaccgcttcctggagcgccactccccctacttccgcagtcacagcgcgcgcatccggggggccacctctttctgccacttgcaagaaaacatgcaagacggaaaatgatgtacagctcgctttttaataaatgtaaagactgtgcactttatttatacacgggctctttctggttatttattcaacaccgccgtcgccatctagaaatcgaaagggttctgccgcgcgtcgccgtgcgccacgggcagagacacgttgcgatactggaagcggctcgcccacttgaactcgggcaccaccatgcggggcagtggttcctcggggaagttctcgccccacagggtgcgggtcagctgcagcgcgctcaggaggtcgggagccgagatcttgaagtcgcagttggggccggaaccctgcgcgcgcgagttgcggtacacggggttgcagcactggaacaccagcagggccggattatgcacgctggccagcaggctctcgtcgctgatcatgtcgctgtccagatcctccgcgttgctcagggcgaatggggtcatcttgcagacctgcctgcccaggaaaggcggcagcccgggcttgccgttgcagtcgcagcgcaggggcatcagcaggtgcccgcggcccgactgcgcctgcgggtacagcgcgcgcatgaaggcttcgatctgcctgaaagccacctgcgccttggctccctccgaaaagaacatcccacaggacttgctggagaactggttcgcgggacagctggcatcgtgcaggcagcagcgcgcgtcggtgttggcgatctgcaccacgttgcgaccccaccggttcttcactatcttggccttggaagcctgctccttcagcgcgcgctggccgttctcgctggtcacatccatctctatcacctgctccttgttgatcatgtttgtcccgtgcagacacttcaggtcgccctccgtctgggtgcagcggtgctcccacagcgcgcaaccggtgggctcccaattcttgtgggtcacccccgcgtaggcctgcaggtaggcctgcaagaagcgccccatcatggccacgaaggtcttctggctcgtaaaggtcagctgcaggccgcgatgctcttcgttcagccaggtcttgcagatggcggccagcgcctcggtctgctcgggcagcatcctaaaatttgtcttcaggtcgttatccacgtggtacttgtccatcatggcgcgcgccgcctccatgcccttctcccaggcggacaccatgggcaggcttagggggtttatcacttccaccggcgaggacaccgtactttcgatttcttcttcctccccctcttcccggcgcgcgcccacgctgctgcgcgctctcaccgcctgcaccaaggggtcgtcttcaggcaagcgccgcaccgagcgcttgccgcccttgacctgcttaatcagcaccggcgggttgctgaagcccaccatggtcagcgccgcctgctcttcttcgtcttcgctgtctaccactatctctggggaagggcttctccgctctgcggcggtgcgcttcttttttttcttgggagcagccgtgacggagtccgccacggcgacggaggtcgagggcgtggggctgggggtgcgcggtaccagggcctcgtcgccctcggactcttcctctgactccaggcggcggcggagtcgcttctttgggggcgcgcgcgtcagcggcggcggagacggggacggggacggggacgggacgccctccacagggggtggtcttcgcgcagacccgcggccgcgctcgggggtcctctcgagctggtcttggtctcgactggccattgtatcctcctcctcctaggcagagagacataaggagtctatcatgcaagtcgagaaggaggagagcttaaccaccccctctgacaccgccgatgcgcccgccgtcgccgtcgcccccgctgccgccgacgcgcccgccacaccgagcgacacccccgcggacccccccgccgacgcacccctgttcgaggaagcggccgtggagcaggacccgggctttgtctcggcagaggaggatttgcgagaggaggagaataaggagaagaagccctcagtgccaaaagatgataaagagcaagacgagcacgacgcagatgcacaccagggtgaagtcgggcggggggacggagggcatggcggcgccgactacctagacgaagggaacgacgtgctcttgaagcacctgcatcgtcagtgcgccatcgtttgcgacgctctgcaggagcgcagcgaagtgcccctcagcgtggcggaggtcagccacgcctacgagctcagcctcttctccccccgggtgcccccccgccgccgcgaaaacggcacatgcgagcccaacccgcgcctcaacttctaccccgccttcgtggtgcccgaggtcctggccacctatcacatcttctttcaaaattgcaagatccccctctcgtgccgcgccaaccgtagccgcgccgataagatgctggccctgcgccagggcgaccacatacctgatatcgccgctttggaagatgtgccaaagatctttgagggtctgggtcgcaacgagaagcgggcagcaaactctctgcaacaggaaaacagcgaaaatgagagtcacaccggggtactggtggagctcgagggcgacaacgcccgcctggcggtggtcaagcgcagcatcgaggtcacccactttgcctaccccgcgctaaacctgccccccaaagtcatgaacgcggccatggacgggctgatcatgcgccgcggccggcccctcgctccagatgcaaacttgcatgaggagaccgaggacggccagcccgtggtcagcgacgagcagctggcgcgctggctggagaccgcggaccccgccgaactggaggagcggcgcaagatgatgatggccgcggtgctggtcaccgtagagctggagtgtctgcagcgcttcttcggcgaccccgagatgcagagaaaggtcgaggagaccctgcactacaccttccgccagggctacgtgcgccaggcttgcaagatctccaacgtggagctcagcaacctggtgtcctacctgggcatcttgcatgagaaccgcctcgggcagagcgtgctgcactccaccctgcgcggggaggcgcgccgcgactacgtgcgcgactgcgtttacctcttcctctgctacacctggcagacggccatgggggtctggcagcagtgtctggaggagcgcaacctcaaagagctggagaagctcctgcagcgcgcgctcaaagacctctggacgggctacaacgagcgctcggtggccgccgcgctggccgacctcatcttccccgagcgcctgctcaaaaccctccagcaggggctgcccgacttcaccagccaaagcatgttgcaaaacttcaggaactttatcctggagcgttctggcatcctacccgccacctgctgcgccctgcccagcgactttgtccccctcgtgtaccgcgagtgccccccgccgctgtggggtcactgctacctgttccaactggccaactacctgtcctaccacgcggacctcatggaggactccagcggcgaggggctcatggagtgccactgccgctgcaacctctgcacgccccaccgctccctggtctgcaacacccaactgctcagcgagagtcagattatcggtaccttcgagctacagggtccgtcctcctcagacgagaagtccgcggctccggggctaaaactcactccggggctgtggacttccgcctacctgcgcaaatttgtacctgaagactaccacgcccacgagatcaggttttacgaggaccaatcccgcccgcccaaggcggagctgaccgcctgcgtcatcacccagggcgagatcctaggccaattgcaagccatccaaaaagcccgccaagattttttgctgaagaagggtcggggggtgtatctggacccccagtcgggtgaggagctcaacccggttcccccgctgccgccgccgcgggaccttgcttcccaggataagcatcgccatggctcccagaaagaagcagcagcggccgccactgccgccaccccacatgctggaggaagaggaggaatactgggacagtcaggcagaggaggtttcggacgaggaggagccggagacggagatggaagagtgggaggaggacagcttagacgaggaggcttccgaagccgaagaggcagacgcaacaccgtcaccctcggccgcagccccctcgcaggcgcccccgaagtccgctcccagcatcagcagcaacagcagcgctataacctccgctcctccaccgccgcgacccacggccgaccgcagacccaaccgtagatgggacaccaccggaaccggggccggtaagtcctccgggagaggcaagcaagcgcagcgccaaggctaccgctcgtggcgcgctcacaagaacgccatagtcgcttgcttgcaagactgcggggggaacatctccttcgcccgccgcttcctgctcttccaccacggtgtggccttcccccgtaacgtcctgcattactaccgtcatctctacagcccctactgcggcggcagtgagccagagacggtcggcggcggcggcgcccgtttcggcgcctaggaagacccagggcaagacttcagccaagaaactcgcggcggccgcggcgaacgcggtcgcgggggccctgcgcctgacggtgaacgaacccctgtcgacccgcgaactgaggaaccgaatcttccccactctctatgccatcttccagcagagcagagggcaggatcaggaactgaaagtaaaaaacaggtctctgcgctccctcacccgcagctgtctgtatcacaagagcgaagaccagcttcggcgcacgctggaggacgctgaggcactcttcagcaaatactgcgcgctcactcttaaggactagctccgcgcccttctcgaatttaggcgggaacgcctacgtcatcgcagcgccgccgtcatgagcaaggacattcccacgccatacatgtggagctatcagccgcagatgggactcgcggcgggcgcctcccaagactactccacccgcatgaactggctcagtgccggcccacacatgatctcacaggttaatgatatccgcacccatcgaaaccaaatattggtggagcaggcggcgattaccaccacgccccgcaataatcccaaccccagggagtggcccgcgtccctggtgtatcaggaaattcccggccccaccaccgtactacttccgcgtgattcccaggccgaagtccaaatgactaactcaggggcgcagctcgcgggcggctgtcgtcacagggtgcggccccctcgccagggtataactcacctggagatccgaggcagaggtattcagctcaacgacgagtcggtgagctcctcgctcggtctcagacctgacgggaccttccagatagccggagccggccgatcttccttcacgccccgccaggcgtacctgactctgcagagctcgtcctcggcgccgcgctcgggcggcatcgggactctccagttcgtgcaggagtttgtgccctcggtctacttcaaccccttctccggctctcccggtcgctacccggaccagttcatctcgaactttgacgccgcgagggactcggtggacggctacgactgaatgtcgggtggacccggtgcagagcaacttcgcctgaagcacctcgaccactgccgccgccctcagtgctttgcccgctgtcagaccggtgagttccagtacttttccctgcccgactcgcacccggacggcccggcgcacggggtgcgctttttcatcccgagtcaggtgcgctctaccctaatcagggagtttaccgcccgtcccctactggcggagttggaaaaggggccttctatcctaaccattgcctgcatctgctctaaccctggattgcaccaagatctttgctgtcatttgtgtgctgagtataataaaggctgagatcagaatctactcgggctcctgtcgccatcctgtcaacgccaccgtccaagcccggcccgatcagcccgaggtgaacctcacctgcggtctgcaccggcgcctgagaaaatacctagcttggtactacaacagcactccctttgtggtttacaacagctttgaccaggacggggtctcactgagggataacctctcgaacctgagctactccatcaggaagaacagcaccctcgagctacttcctccttacctgcccgggacttaccagtgtgtcaccggtccctgcacccacacccacctgttgatcgtaaacgactctcttccgagaacagacctcaataactcctcttcgcagttccccagaacaggaggtgagctcaggaaaccccgggtaaagaagggtggacaagagttaacacttgtggggtttctggtgtatgtgacgctggtggtggctcttttgattaaggcttttccttccatgtctgaactctccctcttcttttatgaacaactcgactagtgctaacgggaccctacccaacgaatcgggattgaatatcggtaaccaggttgcagtttcacttttgattaccttcatagtcctcttcctgctagtgctgtcgcttctgtgcctgcggatcgggggctgctgcatccacgtttatatctggtgctggctgtttagaaggttcggagaccatcgcaggtagaataaacatgctgctgcttaccctctttgtcctggcgctggccgccagctgccaagccttttccgaggctgattttatagaaccccagtgcaatatcacttataaatctgaatataacctctgcactatcctaattaaatgcgttactcaacacgatgaggtaactgttagatacaaagatcaatcaaaaagagacgcactttacagcagctggcaaccaggagatgaacaaaaatacaatgtgaccgtcttccagggcaaactctccaaaacttacaattacactttcccattcgaggagatgtgtgagtttgtcatgttcatgtcaaagcagtacaagatgtggcctccgactccccagggctgtgtggaaaatccaggctctttctgcatgatctctctctgtgtaactgtgctggcactaatactcacgcttttgtatatcagatttaaatcaaggcaaagcttcatcgatgaaaagaaaatgccttaatcgcttttcacgcttgattgctaacaccgggtttttatccgcagaatgattggaatcaccctactaatcacctccctccttgcgattgcccatgggttggaacgaatcgaagtccctgtgggggccaatgttaccctggtggggcctgtcggcaatgctacattaatgtgggaaaaatatactaaaaatcaatgggtctcttactgcactaacaaaaacagccacaagcccagagccatctgcgatgggcaaaatttaaccttgattgatgttcaattgctggatgcgggctactattatgggcagctgggtacaatcgttaattactggagaccccacaaagattacatgcttcacgtagtaaagggtccccttagcagcccgaccactaccaccacctctaccacacccactaccaccactactcccatcaccagcactgccacccagcctcctcatagcagaacaaccacttttatcaattccaagtcccactccccccacattgccggcgggccctccgcctcaaactccgagaccaccgagatctgcttctgcaaatgctctgacgccattgcccaggatttggaagaccacgaggaagatgagcatgacttcgcagatgcatgccaggcatcaggggcagaagcactgccggtggccctcaaacagtatgcagactcccataccacccccgatcttccaccgccttcccagaagccaagtttcctgggggaaaatgaaacactgcctctctccatacttgctttgacatctgttgctattctgactgctctgctggtgctcctatgctctatatgctacctgatctgctgcaggaagaaaaaatctcacggccatgctcaccagccgcttatgcacttcccttaccctccagagttgggcgaccacaaactttaagtctgcagtagctatctgcccatcccttgtcagtcgacagcgatgagccccactaatctaacggcctctggacttacaacattgtctcttaatgagaccaccgctcctcaagacctgtacgatggtgtctccgcgctggttaaccagtgggatcacctgggcatatggtggctcctcataggagcagtgaccctgtgcctaatcctggtctggataatctgctgcatcaaaagcagaagacccaggcggcggcccatctacaggcccttcgtcatcacacctgaagatgatgatggcaccacgtccaggctgcagagcctaaagcagctactcttctcttttacagcatggtaaattgaacatgcctcgcattttcatctacttgtttcttcttccactctttttgggctcttctacattggcagctgtgtcccacatcgaggtagactgcatctcgcccttctcagtctacttactcttcggctttgtcatttgcaactttgtctgcagcgttatcactgtagtgatctgcttcatacagtgcatcgactacgtctgcgtacgggtggcctattttagacaccacccccagtatcgcaacagggacatagcggctctcctaagacttgtttaaatcatgcccaaattaactgtgattgctcttctgattatctgctgcgtcctagccgcgattgggactcagcctactaccaccaccaccagcgctcccagaaagagacatgtttcctgcagcttcaaacgtccctggaatataccccaatgctttactgatgaacctgaaatctctttggcttggtacttcagcgtcaccgcccttctcatcttctgcagtacggttattgcccttgccatttacccttcccttgacctgggctggaatgctgtcaactctatggaatatcccaccttcccagaaccagacctgccagacctggttgttctaaacgcgtttcctcctcctcccgttcaaaatcagtttcgccctccgtccccgacgcccactgaggtcagctactttaatctaacaggcggagatgactgaaaacctagacctagaaatggacggcctctgcagcgaacaacgcatactagagaggcgccggcaaaaagcagagctcgagcgtcttaaacaagagctccaagacgcggtggccatacaccagtgcaaaaaaggtgtcttctgtctagtgaaacaggccacgctcacctatgaaaaaacaggtgacacccaccgcctaggatacaagctgcccacacaacgccagaagttcgcccttatgataggcgaacaacccatcaccgtcacccagcactctgtggagacagaaggctgcatacacgctccctgcaggggcgctgactgtctctacaccttgatcaaaaccctctgcggccttagagacctcatccctttcaattgatcataactgtaatcaataaaaaatcacttacttgaaatctgatagcaagcctctgtccaattttttcagcaacacttccttcccctcctcccaactctggtactctaggcgcctcctagctgcaaacttcctccacagtctgaagggaatgtcagattcctcctcctgtccctccgcacccacgatcttcatgttgttgcagatgaaacgcgcgagatcgtctgacgagaccttcaaccccgtgtacccctacgataccgagatcgctccgacttctgtcccttttcccacccctccctttgtgtcccccgcaggaatgcaagaaaacccccctggagtgctatccctacgccttgcagaacccttgaccacctccaatggagcgctgaccctaaaaatggggggtggtttgaccctggacgaagaaggaaagcttacttcccaaaatattaccagtgttgatcctcctcttaaaaaaacaaaaaacaatatcagtctgcagactgcctccccccttgccgtcagctcgggagccctcacacttttcgctactcctcccctggcagttaatgacaataacctaactgtgcagtctcaggctccccttacactggaaaactcaaaactaagtctggccaccaaaggccccctaaccgtttctgaaggaaaacttgccctagaaacagaggctcccttgcatgcaagcgacagcagtagcctaggccttagtgtaacggccccactgagcattagcagcgacagcctaggactagacttgcaagcgcccattatttctgaaaatggaaaactgggcctaagagtaacaggtcccctaactgtggccagcagtattgatgctttgacagtagccacaggcagcggtattggacttgatagcaacacgcgcctacaggcaaaattggtcgcgcccctaggctttgacaccaatggcaacattaagctcagcacttcgggcggcatgagactgaacaatggcacacttatactagatgtaaactacccatttgaggctcaaggtcaacttagtctaagagtgggttcgggtccactgtatgtagactccaacacacataacctaaccgctagatgccttagagggctatacataacgtcatctaataaccaaaccggcctggaggccaacataaaacttacaaaaggacttgtgtttgatggaaatgccatagcagttaatgttagcaaagggctagaatacagtaccactgaaacagcgcagggtgtaaatcccatacagactaaaataggtttgggcatggaatatgataccaatggagccataaagccaagactaggctctggtttgagctttgataattcaggagctattgtagtgggaaacaaaaatgatgacactcttactctgtggactacaccagacccatctcccaactgtcagattaactcggaaaaagatgctaaactaaccttggtactaaccaagtgcggtagtcaaattgtaggcacagtatctgcctttgctcttaaaggcagccttgccccaattaatggcacagtgagctcagttagtatattcctaagatttaatgaaaatggggtactgatgagcaactcatcgttggaaagccaatactggaattacaggaatggaaattcaactaatgccacaccatatacaaatgcactaggttttatgcctaacctggcagcttatcccaaaggccaggcaacgactgcaaaaagcagcatcattagccaggtttacatgaatggtgacacttccaaacctatgatatttacaataacttttaatgggcttgaaacagaggaaactcaggtcagtacatattccatgacattttcatggaggtggacaaatggagactacgtggggcactattttaaaacaaactcctttactttctcctacattgcccaagaataaagaaagcacagagatgcttgtttttgatttcaaaattgtgtgcttttatttatttcaagcttacagtatttccagtagtcattcgaatagagcttaattaaactgcatgagaacccttccacatagcttaaattagcaccagtgcaaatggagaaaaatcaacatacctttttatccagatatcagagaactctagtggtcagttttcccccaccctcccagctcacagaatacacagtcctttccccccggctggctttaaacaacactatctcattggtaacagacatattcttaggtgtaataatccacacggtctcttggcgggccaaacgctggtcggtgatgttaataaactccccaggcagctctttcaagttcacgtcgctgtccaactgctgaagcgctcgcggctccgactgcgcctctagcggaggcaacggcaacacccgatccttgatctataaaggagtagagtcataatcccccataagaatagggcggtgatgcagcaacaaggcgcgcagcaactcctgccgccgcctctccgtacggcaggaatgcaacggcgtggtggtctcctccgcgataatccgcaccgctcgcagcatcagcatcctcgtcctccgggcacagcagcgcatcctgatctcactgagatcggcgcagtaagtgcagcacaaaaccaagatgttatttaagatcccacagtgcaaagcgctgtacccaaagctcatggcgggaaggacagcccccacgtgaccatcataccagatcctcaggtaaatcaaatgacgacctctcataaacacgctggacatgtacatcacctccttgggcatgtgctgattcaccacctctcgataccacaagcatcgctgattaattaaagacccctcgagcaccatcctgaaccaggaagccagcacctgaccccccgccaggcactgcagggaccccggtgaatcgcagtggcagtgaagactccagcgctcgtagccgtgaaccatagagctggtcattatatccaaattggcacaacacagacacactttcatacactttttcatgattagcagctcctctctagtcaggaccatatcccaaggaatcacccactcttgaatcaaggtaaatcccacacagcagggcaggcctctcacataactcacgttatgcatagtgagcgtgtcgcaatctggaaataccggatgatcttccatcaccgaagcccgggtctccgtctcaaagggaggtaaacggtccctcgtgtagggacagtggcgggataatcgagatcgtgttgaacgtagagtcatgccaaagggaacagcggacgtactcatatttcctccagcagaaccaagtgcgcgcgtggcagctatccctgcgtcttctgtctcgccgcctgccccgttcggtgtagtagttgtaatacagccactccctgagaccgtcaaggcgctccctggcgtccggatctatgacaacaccgtcctgcagcgccgccctgatgacatccaccaccgtagagtatgccaagcccagccaggaaatgcattcactttgacagcgagagataggaggagcggggagagatggaagaaccatgatagtaaagagaacttttattccaatcgatcttctaagatatcaaagtggagatctataagatgacactggtctcctccgctgagtcgatcaaaaataacagctaaaccacaaacaacacgattggtcaaatgctccacaagggcctgcagcataaaattgcctcggaactccaccgcaagcataacatcaaagccaccgcctctatcgtgatcaagaataaaaaccccacagctatccaccagacccatatagttttcatctctccatcgtgaaaaaagatttacaagctcctcctttaaatcacctccaaccaattgaaaaagttgaaccagaccgccctccaccttcattttcagcaagcgtatcatgattgcaaaaattcaggctcctcagacacctgtataagattgagaagcggaacgttaacatcgatgtttcgctcgcgtaaatcacgcctcagtgcaagcataatataatcccacaggtcggagcggatcagcgaggacacctccccgccaggaaccaactcaacggagcctatgctgattataatacgcatattcggagctatgctaaccagcacggcccccaaataggcgtactgcataggcggcgacaaaaagtgaacagtttgggttaaaaaatcaggcaaacactcgcgcaaaaaagcaagaacatcataaccatgctcatgcaaatagatgcaagtaagctcaggaacgaccacagaaaaatgcacaatttttctctcaaacatgactgcgagccctgcaaaaaataaaaaagaaacattacacaagagtagcctgtcttacgatgggatagactactctaaccaacataagacgggccacaacatcgcccgcgtggccataaaaaaaattgtccgtgtgattaaaaagaagcacagatagctggccagtcatatccggagtcatcacgtgtgaacccgtgtagacccccgggttggacacatcggccaaagaaagaaagcggccaatgtacccaggaggaattataacactaagacgaagatacaacagaataaccccatgagggggaataacaaagttagtaggtgaataaaaacgataaacacccgaaactccctcctgcgtaggcaaaatagcaccctccccttccaaaacaacatatagcgcttccacagcagccatgacaaaagactcaaaacactcaaaagactcagtcttaccaggaaaataaaagcactctcacagcaccagcactaatcagagtgtgaaaagggccaagtgccgaacgagtatatataggaataaaaaatgacgtaaatgtgtaaaggtcagaaaacgcccagaaaaatacacagaccaacgcccgaaacgaaaacccgcgaaaaaatacccagaacttcctcaacaaccgccacttccgctttctcacgatacgtcacttccgcaagaaaagcaaaactacatttcccacatgtgtaaaaacgaaaccccgccccttctaaccgcccacaacttacatcatcaaaacgtaaagtcctacgtcacccgccccgcctctccccgcccacctcattatcatattggccacaatccaaaataaggtatattat

SEQ ID NO: 55 - DNA, 37057 bp, Gorilla beringei graueri
ataatataccttattttggattgtggccaatatgataatgaggtgggcggggagaggcggggcgggtgacgtaggacgcgcgagtagggttgggaggtgtggcggaagtgtggcatttgcaagtgggaggagctcacatgcaagcttccgtcgcggaaaatgtgacgtttttgatgagcgccgcctacctccggaagtgccaattttcgcgcgcttttcaccggatatcgtagtaattttgggcgggaccatgtaagatttggccattttcgcgcgaaaagtgaaacggggaagtgaaaactgaataatagggcgttagtcatagcgcgtaatatttaccgagggccgagggactttgaccgattacgtggaggactcgcccaggtgttttttacgtgaatttccgcgttccgggtcaaagtctccgtttttattgtcaccgtcatttgacgcggagggtatttaaacccgctgcgctcctcaagaggccactcttgagtgccagcgagaagagttttctcctctgctccgcttcggtgatcgaaaaatgagacacatagcctgcactccgggtcttttgtccggtcgggcggcggccgagcttttggacgctttgatcaatgatgtcctgagcgatgattttccgtctactacccactttagcccacctactcttcacgaactgtacgatctggatgtactggtggatgtgaacgatcccaacgaggaggcggtttctgcgttttttcccgagtctgcgctgttggccgctcaggagggatttgacctacacactccgccgcctattttagagtctccgctgccggagcccagtggtataccttatatgcctgaactgcttcccgaagtggtagacctgacctgccacgagcctggctttccgcccagcgacgatgatggtgagccttttgttttagactttgctgagatacctgggcacggttgcaggtcttgtgcatatcatcagagggttaccggagaccccgaggttaagtgttcgctgtgctatatgaggatgacctcttcctttatctacagtaagtttttgtctaggtgggcttttgggtaggtgggttttgtgtcagaacaggtgtaaacgttgcttgtgttttttgtacctgtaggtccggtgtccgagccagacccggagcccgaccgcgatcccgagccggatcccgagcctcctcgcaggacaaggaaactaccttccattctgtgcaagtctcagacacctgtaaggaccagcgaggcagacagcaccgactctggcacttctacctctccccctgaaattcacccagtggttcctctgggtatacataaacctgttgctgttagagtttgcgggcgacgccctgcagtacagtgcattgaggacttgcttcacgatcccgaggaacctttggacttgagccttaaacgccctaggcaataaaccccacctaagtaataaaccccacctaagtaataaaccctgccgcccttggttattgagatgacgcccaatgtttgcttttgaatgacttcatgtgtgtaataaaagtgagtgtgatcataggtctcttgtttgtctgggcggggcttaagggtatataagtttctcggggctaaacttggttacacttgaccccaatggaggcgtgggggtgcttggaggagtttgcggacgtgcgccgtttgctggacgagagctctaaccatacctatactatttggaggtatctgtggggctctactcaggccaagttggtctccagaattaagcaggattacaagtgcgattttgaagagctttttagttcctgcggtgagcttttgcaatccttgaatctgggccatcaggctattttccaggaaaaggttctctcgactttggatttttccactcccgggcgcaccgccgcttgtgtggcttttgtgtcttttgtgcaagataaatggagcgaggagacccacctgagtcacggctacgtactggatttcatggcgatggctctttggagggctcacaacaaatggaagattcagaaggaactgtacggttccgccctacgtcgtccacttttgtcgcgacaggggctgaggtttcccgaccatcggcagcatcagaatctggaagacgagtcggaggagcgagcggaggagaagatcagcttgagagccggcctggaccctcctcaggaggaatgaatctcccgcaggtggttgacctgtttccagaactgagacgggtcctgactatcagggaggatggtcagtttgtgaagaagtttaagagggatcggggtgagggagatgatgaggcggctagcaatttagcttttagtctgatgactcgccaccgaccggaatgtattacctatcagcagattaaggagagttgtgccaacgagctggatcttttgggtcagaagtatagcatagaacagcttaccacttactggcttcagcctggggatgattgggaagaggcgatcagggtgtatgcaaaggtggccctgcggcccgattgcaagtataagattactaagttggttaatattagaaactgctgctatatttctgggaacggggccgaagtggagatagatactcaggacagggtggcttttaggtgttgcatgataaacatgtggcccgggatactggggatggatggggtggtgttcatgaatgtgaggtttacgggccccaactttaatggcacggtgttcatgggcaacaccaacttgctcctgcatggtgcgagtttctatgggtttaataacacctgtatagaggcctggaccgatgtaaaggttcgaggttgttccttttatagctgttggaaggcggtggtgtgtcgccctaaaagcaggggttctgtgaaaaaatgcttgtttgaaaggtgcaccttaggcatcctctctgagggcaactccagggtgcgccataatgtggcttcgaactgcggttgcttcatgcaagtgaagggggtgagcgttatcaagcataactcggtgtgtggaaactgcgaggatcgcgcctcccagatgctgacctgctttgatggtaactgtcacctgttgaagaccattcatataagcagccaccccagaaaggcctggcccgtgtttgagcataacatcctgacccgctgctccttgcatctgggggtcaggaggggtatgttcctgccttaccagtgtaactttagccacactaaaatcctgctggaacccgagtgtatgaccaaggtcagcctaaatggcgtgtttgatgcgactctgagaatctggaaggtgctgaggtatgatgagaccaggaccaggtgccgaccctgcgagtgcggcggcaagcacatgagaaatcagcctgtgatgttggatgtgaccgaggagcttaggcctgaccatctggtgctggcctgcaccagggccgagtttgggtctagcgatgaggataccgattgaggtgggtaaggtgggcgtggctagaagggtggggcgtgtataaattgggggtctaagggtctctctgttttgtcttgcaacagccgccgccatgagcgacaccggcaacagctttgatggaagcatctttagcccctatctgacagtgcgcatgcctcactgggctggagtgcgtcagaatgtgatgggttccaacgtggatggacgccccgttctgccttcaaattcgtctacaatggcctacgcgaccgtgggaggaactccgctggacgccgcgacctccgccgccgcctccgccgccgccgcgaccgcgcgcagcatggctacggacctttacagctctttggtggcgagcagcgcggcctctcgcgcgtctgctcgggatgagaaactgaccgctctgctgcttaaactggaagacttgacccgggagctgggtcaactgacccagcaggtctccagcttgcgtgagagcagccttgcctccccctaatggcccataatataaataaaagccagtctgtttggattaagcaagtgtatgttctttatttaactctccgcgcgcggtaagcccgggaccagcggtctcggtcgtttagggtgcggtggattctttccaacacgtggtacaggtggctctggatgtttagatacatgggcatgagtccatccctggggtggaggtagcaccactgcagagcttcgtgctcgggggtggtgttgtatatgatccagtcgtagcaggagcgctgggcgtggtgctgaaaaatgtccttaagcaagaggcttatagctagggggaggcccttggtgtaagtgtttacaaatctgctcagttgggaggggtgcatccggggggatataatgtgcatcttggactggatttttaggttggctatgttcccacccagatcccttctgggattcatgttgtgcaggaccaccagcacggtatatccagtgcacttgggaaatttatcgtggagcttagacgggaatgcatggaagaacttggagacgcccttgtggcctcccagattttccatacattcgtccatgatgatggcaatgggcccgtgggaagctgcctgagcaaaaatgtttctgggatcgctcacatcgtagttatgttccagggtgaggtcatcataagacatctttacaaatcgggggcggagggtcccggactggggtatgatggtaccctcgggccccggggcgtagttcccctcacagatctgcatctcccaggctttcatttcagagggagggatcatatccacctgcggagcgatgaaaaacacagtttctggcgcaggggagattaactgggatgagagcaggtttctgagcagctgtgactttccacagccggtgggcccatatatcacgcctatcaccggctgcagctggtagttaagagagctgcagctgccgtcctcccggagcaggggggccacctcgttcagcatatccctgacgtggatgttctccctgaccaattccgccagaaggcgctcgccgcccagcgaaagcagctcttgcaaggaagcaaaatttttcagcggttttaggccgtcggccgtgggcatgtttttcagcgtctgggtcagcagttccagcctgtcccacagctcggtgatgtgctctacggcatctcgatccagcagatctcctcgtttcgcgggttggggcggctttcgctgtagggcaccagccgatgggcgtccagcggggccagagtcatgtccttccatgggcgcagggtcctcgtcagggtggtctgggtcacggtgaaggggtgcgctccgggttgggcgctggccagggtgcgcttgaggctggttctgctggtgctgaatcgctgccgctcttcgccctgcgcgtcggccaggtagcatttgaccatggtctcgtagtcgagaccctcggcggcgtgccccttggcgcggagctttcccttggaggtggcgccgcacgaggggcactgcaggctcttcagggcgtagagcttgggagcgagaaacacggactctggggagtaggcgtccgcgccgcaggaagcgcagaccgtctcgcattccaccagccaagtgagctccgggcggtcagggtcaaaaaccaggttgcccccatgctttttgatgcgtttcttacctcggctctccatgaggcggtgtcccttctcggtgacgaagaggctgtccgtgtccccgtagaccgacttcaggggcctgtcttccagcggagtgcctctgtcctcctcgtagagaaactctgaccactctgagacgaaggcccgcgtccaggccaggacgaaggaggccacgtgggaggggtagcggtcgttgtccactagcgggtccaccttctccagggtgtgcaggcacatgtccccctcctccgcgtccagaaaagtgattggcttgtaggtgtaggacacgtgaccgggggttcccgacgggggggtataaaagggggtgggcgccctttcatcttcactctcttccgcatcgctgtctgcgagagccagctgctggggtaagtattccctctcgaaggcgggcatgacctcagcgctcaggttgtcagtttctaaaaatgaggaggatttgatgttcacctgtcctgaggtgatacctttgagggtacctgggtccatctggtcagaaaacactatttttttgttgtcaagcttggtggcgaacgacccgtagagggcgttggagagcagcttggcgatggagcgcagggtctggtttttgtcgcggtcggctcgctccttggccgcgatgttgagttgcacgtactcgcgggccacgcacttccactcggggaagacggtggtgcgctcgtctgggatcaggcgcaccctccagcctcggttgtgcagggtgaccatgtcgacgctggtggcgacctcgccgcgcaggcgctcgttggtccagcagaggcggccgcccttgcgcgagcagaaggggggtagggggtccagctggtcctcgtttggggggtccgcgtcgatggtgaagaccccggggagcaagcgcgggtcaaagtagtcgatcttgcaagcttgcatgtccagagcccgctgccattcgcgggcggcgagcgcgcgctcgtaggggttgaggggcgggccccagggcatggggtgggtgagcgcggaggcgtacatgccgcagatgtcatacacgtacaggggttccctgaggatgccgaggtaggtggggtagcagcgccccccgcggatgctggcgcgcacgtagtcatagagctcgtgggagggggccagcatgttgggcccgaggttggtgcgctgggggcgctcggcgcggaaggcgatctgcctgaagatggcatgggagttggaggagatggtgggccgctggaagacgttgaagcttgcttcttgcaagcccaccgagtccctgacgaaggaggcgtaggactcgcgcagcttgtgcaccagctcggcggtgacctggacgtcgagcgcgcagtagtcgagggtctcgcggatgatgtcatacttatcctcccccttctttttccacagctcgcggttgaggacgaactcttcgcggtctttccagtactcttggaggggaaacccgtccgtgtccgaacggtaagagcctagcatgtagaactggttgacggcctggtaggggcaacagcccttctccacgggcagcgcgtaggcctgcgccgccttgcggagggaggtgtgggtgagggcgaaagtgtccctgaccatgactttgaggtattgatgtttgaagtctgtgtcatcgcagccgccctgttcccacagggtgtagtccgtgcgctttttggagcgcgggttgggcagggagaaggtgaggtcattgaagaggatcttccccgctcgaggcatgaagtttctggtgatgcgaaagggccctgggaccgaggagcggttgttgatgacctgggcggccaggacgatctcgtcaaagccgtttatgttgtggcccacgatgtagagctccaaaaagcggggctggcccttgatggaggggagctttttgagttcctcgtaggtgagctcctcgggcgattccaggccgtgctcctccagggcccagtcttgcaagtgagggttggccgccaggaaggatcgccagaggtcgcgggccatgagggtctgcaggcggtcgcggaaggttctgaactgtcgccccacggccatcttttcgggggtgatgcagtagaaggtgagggggtctttctcccaggggtcccatctgagctctcgggcgaggtcgcgcgcggcggcgaccagagcctcgtcgccccccagtttcatgaccagcatgaagggcacgagctgcttgccaaaggctcccatccaagtgtaggtctctacatcgtaggtgacaaagaggcgctccgtgcgaggatgagagccgatcgggaagaactggatctcccgccaccagttggaggattggctgttgatgtggtgaaagtagaagtcccgtctgcgggccgagcactcgtgctggcttttgtaaaagcgaccgcagtactggcagcgctgcacgggttgtatatcttgcacgaggtgaacctggcgacctctgacgaggaagcgcagcgggaatctaagtcccccgcctggggtcccgtgtggctggtggtcttctactttggttgtctggccgccagcatctgtctcctggagggcgatggtggagcagaccaccacgccgcgagagccgcaggtccagatctcggcgctcggcgggcggagtttgatgacgacatcgcgcacattggagctgtccatggtctccagctcccgcggcggcaggtcagctgggagttcctggaggttcacctcgcagagacgggtcaaggcgcgggcagtgttgagatggtatctgatttcaaggggcgtgttggcggcggagtcgatggcttgcaggaggccgcagccccggggggccacgatggttccccgcggggcgcgaggggaggcggaagctgggggtgtgttcagaagcggtgacgcgggcgggcccccggaggtagggggggttccggccccacgggcatgggcggcaggggcacgtcttcgccgcgcgcgggcaggggctggtgctggctccgaagagcgcttgcgtgcgcgacgacgcgacggttggtgtcctgtatctggcgcctctgagtgaagaccacgggtcccgtgaccttgaacctgaaagagagttcgacagaatcaatctcggcatcgttgacagcggcctggcgcaggatctcctgcacgtcgcccgagttgtcctggtaggcgatctctgccatgaactgctcgatctcttcctcctggagatctcctcgtccggcgcgctccacggtggccgccaggtcgttggagatgcgacccatgagctgcgagaaggcgttgagcccgccctcgttccagacccggctgtagaccacgcccccctcggcgtcgcgggcgcgcatgaccacctgggccaggttgagctccacgtgtcgcgtgaagacggcgtagttgcgcaggcgctggaaaaggtagttcagggtggtggcggtgtgctcggcgacgaagaagtacatgacccagcgccgcaacgtggattcattgatgtcccccaaggcctccaggcgctccatggcctcgtagaagtccacggcgaagttgaaaaactgggagttgcgagcggacacggtcaactcctcctccagaagacggatgagctcggcgacagtgtcgcgcacctcgcgctcgaaggccacggggggcgcttcttcctcttccacctcttcttccatgatcgcttcttcttcttcctcagccgggacgggagggggcggcggcggcgggggaggggcgcggcggcggcggcggcgcaccgggaggcggtcgatgaagcgctcgatcatctccccccgcatgcggcgcatggtctcggtgacggcgcggccgttctcccgggggcgcagctcgaagacgccgcctctcatctcgccgcggggcgggcggccgtgaggtagcgagacggcgctgactatgcatcttaacaattgctgtgtaggtacgccgccgagggacctgattgagtccagatccaccggatccgaaaacctttggaggaaagcgtctatccagtcgcagtcgcaaggtaggctgagcaccgtggcgggcgggggcgggtctggagagttcctggcggagatgctgctgatgatgtaattaaagtaggcggtcttgagaaggcggatggtggacaggagcaccatgtctttgggtccggcctgttggatgcggaggcggtcggccatgccccaggcctcgttctgacaccggcgcaggtctttgtagtagtcttgcatgagtctttccaccggcacctcttctccttcctcttctccatctcgccggtggtttctcgcgccgcccatgcgcgtgaccccaaagcccctgagcggctgcagcagggccaggtcggcgaccacgcgctcggccaagatggcctgctgcacctgagtgagggtcctctcgaagtcatccatgtccacgaagcggtggtaggcgcccgtgttgatggtgtaggtgcagttggccatgacggaccagttgacggtctggtgtcccggctgcgagagctccgtgtaccgcaggcgcgagaaggcgcgggaatcgaacacgtagtcgttgcaagtccgcaccagatactggtagcccaccaggaagtgcggcggaggttggcgatagaggggccagcgctgggtggcgggggcgccgggcgccaggtcttccagcataaggcggtggtatccgtagatgtacctggacatccaggtgatgccggcggcggtggtggtggcgcgcgcgtagtcgcggacccggttccagatgtttcgcaggggcaagaagtgttccatggtcggcacgctctggccggtgaggcgcgcgcagtcgttgacgctctatacacacacaaaaacgaaagcgtttacagggctttcgttctgtagcctggaggaaagtaaatgggttgggttgcggtgtgccccggttcgagaccaagctgagctcggccggctgaagccgcagctaacgtggtattggcagtcccgtctcgacccaggccctgtatcctccaggatacggtcgagagcccttttgctttcttggccaagcgcccgtggcgcgatctgggatagatggtcgcgatgagaggacaaaagcggctcgcttccgtagtctggagaaacaatcgccagggttgcgttgcggcgtaccccggttcgagcccctatggcggcttggatcggccggaaccgcggctaacgagggccgtggcagccccgtcctcaggaccccgccagccgacttctccagttacgggagcgagccccttttgtttttttattttttagatgcatcccgtgctgcggcagatgcgcccctcgccccggcccgatcagcagcagcaacagcaggcatgcagacccccctctcccctttccgccccggtcaccacggccgcggcggccgtgtcgggcgcggggggcgcgctggagtcagatgagccaccgcggcggcgacctaggcagtatctggacttggaagagggcgagggactggcgcggctgggggcgaactctccagagcgccacccgcgggtgcagttgaaaagggacgcgcgcgaggcgtacctgccgcggcagaacctgtttcgcgaccgcgggggcgaggagcccgaggagatgcgagactgcaggttccaagcggggcgcgagctgcggcgcgggctggacagacagcgcctgctgcgcgaggaggactttgagcccgacacgcagacgggcatcagccccgcgcgcgcgcacgtagccgcggccgacctggtgaccgcctacgagcagacggtgaaccaggagcgcaacttccaaaagagcttcaacaaccacgtgcgcacgctggtggcgcgcgaggaggtgaccctgggtctcatgcatctgtgggacctggtggaggcgatcgtgcagaaccccagcagcaagcccctgaccgcgcagctgttcctggtggtgcagcacagcagggacaacgaggccttcagggaggcgctgctgaacatcaccgagccggaggggcgctggctcctggacctgataaacatcctgcagagcatagtggtgcaggagcgcagcctgagcctggccgagaaggtggcggccatcaactactctatgctgagcctgggcaagttctacgcccgcaagatctacaagaccccctacgtgcccatagacaaggaggtgaagatagacagcttctacatgcgcatggcgctgaaggtgctgaccctgagcgacgacctgggagtgtaccgcaacgagcgcatccacaaggccgtgagcgccagccggcggcgcgagctgagcgaccgcgagctgatgcacagtctgcagcgcgcgctgaccggcgcgggcgagggcgacagggaggtcgagtcctacttcgacatgggggccgacctgcactggcagccgagccgccgcgccctggaggcggcgggggcgtacggcggccccctggcggacgatgaccaggaagaggaggactatgagctagaggagggcgagtacctggaggactgacctggctggtggtgttttggtatagatgcaagatccgaacgtggcggacccggcggtccgggcggcgctgcagagccagccgtccggcattaactcctctgacgactgggccgcggccatgagtcgcatcatggccctgaccgcgcgcaaccccgaggctttcaggcagcagcctcaggccaaccggctggcggccatcttggaagcggtagtgcccgcgcgctccaaccccacccacgagaaggtgctggccatagtcaacgcgctggcggagagcagggccatccgcgcggacgaggccggactggtgtacgatgcgctgctgcagcgggtggcgcggtacaacagcggcaacgtgcagaccaacctggaccgcctggtgacggatgtgcgcgaggccgtggcgcagcgcgagcgcttgcatcaggacggtaacctgggctcgctggtggcgctaaacgccttcctcagcacccagccggccaacgtaccgcgggggcaggaggactacaccaactttttgagcgcgctgcggctgatggtgaccgaggtccctcagagcgaggtgtaccagtcggggcccgactacttcttccagaccagcagacagggcttgcaaaccgtgaacctgagccaggctttgaagaacctgcgggggctgtggggagtgaaggcgcccaccggcgaccgggctacggtgtccagcctgctaacccccaactcgcgcctgctgctgctgctgatcgcgcccttcacggacagcgggagcgtctcgcgggaaacctatctgggccacctgctgacgctgtaccgcgaggccatcgggcaggcgcaggtggacgagcacaccttccaagagatcaccagcgtgagccacgcgctggggcaggaggacacgggcagcctgcaggcgaccctgaactacctgctgaccaacaggcggcagaagattcccacgctgcacagcctgacgcaggaggaggagcgcatcttgcgctacgtgcagcagagcgtgagcctgaacctgatgcgcgacggcgtgacgcccagcgtggcgctggacatgaccgcgcgcaacatggaaccgggcatgtacgcctcccaccggccgttcattaaccgcctgatggactacttgcatcgggcggcggccgtgaaccccgagtacttcactaatgccattctgaatccccactggatgccccctccgggtttctacaacggggacttcgaggtgcccgaggttaacgacgggttcctctgggatgacatggatgacagtgtgttctcacccaacccgctgcgcgccgcgtctctgcgattgaaggagggttctgacagggaaggaccgaggagtctggcctcctccctggctctgggagcggtgggcgcggcggcgcggggcagtagccccttccccagcctggcagactctctgaacagcgggcgggtgagcaggccccgcttgctaggcgaggaggagtatctgaacaactccctgctgcagcccgcgagggacaaaaacgctcagcggcagcagtttcccaacaatgggatagagagcctggtggacaagatgtccagatggaagacgtatgcgcaggagtacaaggagtgggaggaccgccagccgcggcccctgccgccccctaggcagcgctggcagcggcgcgcgtccaaccgccgctggaggcaggggcccgaggacgatgatgactctgcagatgacagcagcgtgctggacctgggcgggagcgggaaccccttttcgcacctgcgcccccgcctgggcaagatgttttaaaagagaaaaaataaaaactcaccaaggccatggcgacgagcgttggttttttgttcccttccttagtatgcgacgcgcggcgatgttcgaggaggggcctcccccctcttacgagagcgcgatgggattttctcctgcgacgcccctacagcctccctacgtgcctcctcggtacctgcaacctaccgggggaagaaatagcatctgttactctgagctgcagcccctgtatgacaccaccaaagtgtacctggtggacaacaagtctgcggacgtggcctccctgaactaccagaacgaccacagcgattttttgaccaccgtgatccaaaacaatgacttcaccccaaacgaggccagcacccagaccataaacctggacaacaggtcgcactggggcggtgatctgaagaccatcttgcacaccaacatgcccaacgtgaatgagtttatgtttactaactcttttaaggcgcgggtaatggtggcgcgcgacgataagggagtgcctaaatacgagtgggtggactttacactgcccgagggcaactactccgagatcatgactcttgacctgatgaacaacgcgatcgtggagcactacttgaaagtaggcaggcagaacggggtaaaagaaagcgatattggagttaagtttgacaccaggaactttcgcctgggatgggaccccgagacggggttggttatgcccggggtttacactaatgaagcttttcaccccgatatagtgctcttgcccggatgcggggtggacttcacccaaagccggctgagcaacctgctgggcattcgaaagcgccagccattccaggaggggtttcaaatcacttatgagcatttggaagggggcaacattccggcgcttctggatttggtcgcctacgaggagagtttgaaatccgaggaaagcggggataacactgacaagggcggcgaggagcaagccggcgatggcgacactgcttcggtagaaaacgaaagtgcgtccgtggtggaggcggcggcggtagcgaccgcagagccggagaccgtagaggaggatatgaatgatagcgcaatcagaggagactcgtttattccccggggcgaagaaaagaaggcggaggctgcggcagcagtcgaagcagagcccaaagtcgagtcggagatcatggaggaggatttgaatgataacgcgatcagaggtgatacgtttgtgccgcggggcgaagaaaaaaaagcggaggcggaggccgcggctgaggaggcggccgaggctgtggcagccaccgcggcggtgactgaaacaactgaggagcaggttcaggccgagcaggttcaaaagaagcccgtgattaaagccctaacacaagatagcaaggagcgcagttacaacttgattcccggtagtactgacaccgagtaccgcagctggtacctggcatacaactacggcgacccggtcaaaggggtgcgctcgtggactctgctttgcacgccggacgtcacctgcggctccgagcagatgtactggtcgttgccaaacatgatgcaagacccggtgaccttccgctccacgcggcaggttaacaacttcccggtggtgggcgccgaactgctgcccgtgcactccaagagcttttacaacgagcaggccgtgtactcccagctgatccgccaggccacctctctgacccacgtgttcaatcgctttcccgagaaccagattttggcgcgcccgccggcccccaccatcactaccgtcagtgaaaacgttcctgctctcacagatcacgggacgctaccgctgcgcaacagcatctcaggagtccagcgagtgaccattactgacgccagacgccggacctgcccctacgtttacaaggccttgggcatagtctcgccgcgcgtcctctccagccgcactttttaaaacacatattcacccacgcttcaaagattatgtctatacttatctcacccagcaataacaccggctgggggctgcgcgcgcccagcaagatgtttggaggggcgagaaaacgttccgagcagcacccagtgcgcgtgcgcggccactaccgcgcgccctggggagcgcacaagcgcgggcgcgcagggcgcaccactgtggacgacgccattgactccgtagtggagcaggcgcgccactacacacccggcgcgccgtccgcccccgccgtgtccaccgtggacgaggcgatcgaaagcgtggtacagggcgcgcggcactatgccaaccttaaaaatcgccgccgtcgcgtggcccgccgccatcgccggagaccccgggccaccgccgccgcgcgccttgctaaggctctactcaggcgcgccaggcgaactggccgccgggccgccatgagggccgcacggcgggctgccgccagtgcggccgccgcggccccacgggcacgaaggcgcgcggccgctgccgccgccgccgccatttccagcttggcctcaacgcggcgcggtaacatatactgggtgcgcgactcgataaccggcacgcgggtacccgtgcgctttcgccccccgcggaattagcacaagacaacatacacactgagtctcctgctgttgtgtatcccagcggcgaccgtcagcagcggcgacatgtccaagcgcaaaattaaagaagagatgctccaggtcatcgcgccggagatctatgggcccccgaagaaggaggaggatgattacaagccccgcaagctaaagcgggtcaaaaagaaaaagaaagatgatgatgatgacgaggcggtggagtttgtccgccgcatggcacccaggcgccccgtgcagtggaagggtcggcgcgtgcagcgcgttttgcgccccggcaccgcggtggtcttcacgcccggcgagcgctccacgcgcactttcaagcgggtgtacgatgaggtgtacggcgacgaggacctgttggagcaggccaaccagcgctttggggagtttgcatatgggaaacggccccgcgagagtctaaaagaggacctgctggcgctaccgctggacgagggcaatcccaccccgagtctgaagccggtgaccctgcaacaggtgctgcctttgagcgcgcccagcgagcataagcgagggttgaagcgcgagggcggggacctggcgcccaccgtgcagttgatggtgcccaagcggcagaagctggaggacgtgctggagaaaatgaaagtagagcccgggatccagcccgagatcaaggtccgccccatcaagcaggtggcgcccggcgtgggagtccagaccgtggacgttaggattcccacggaggagatggaaacccaaaccgccactccctcttcagcggccagcgccaccaccggcaccgcttcggtagaggtgcagacggacccctggctacccgccgccgctgtcgccgccgccgccgccccccgttctcgcgggcgcaagagaaattatccagtggccagcgcgctcatgccccagtacgcactgcatccatccatcgcgcccacccccggctaccgcgggtattcgtaccgcccgcgcagatcggccggcactcgcggccgccgccgccgtgcgaccacaaccagccgccgccgtcgccgccgccgccagccagtgctgacccccgtgtctgtaaggaaggtggctcgctcggggagcacgctggtggtgcccagagcgcgctaccaccccagcatcgtttaaagccggtctctgtatggttcttgcagatatggccctcacttgtcgcctccgcttcccggtgccgggataccgaggaagaactcaccgccgcagaggcatggcgggcagcggtctccgcggcggccgtcgccatcgccggcgcgcaaaaagcaggcgcatgcgcggcggtgtgctgcctctgctaatcccgctaatcgccgcggcgatcggtgccgtacccgggatcgcctccgtggccctgcaggcgtcccagaaacgttgactcttgcaaccttgcaagcttgcatttttttggaggaaaaataaaaaagtctagactctcacgctcgcttggtcctgtgactattttgtagaaaaaagatggaagacatcaactttgcgtcgctggccccgcgtcatggctcgcgcccgttcatgggagactggacagatatcggcaccagcagtatgagcggtggcgccttcagctggggcagtctgtggagcggccttaaaaattttggttccaccattaaaaactatggcaacaaagcgtggaacagcagcacgggccagatgctaagagacaagttgaaagagcagaacttccaggagaaggtggcgcagggcctggcctctggcatcagcggggtggtggacatagctaaccaggccgtgcagaaaaagataaacagtcatctggacccccgccctcaggtggaggaaacgcctccagccatggagacggtgtttcccgagggcaaaggcgaaaagcgcccgcggcccgacagggaagagaccctggtgtcacacaccgaggagccgccctcttacgaggaggcactcaaggccggcctgcccaccactcgccccgtagctcccatggccacaggtgtggtgggccataaacaacacacccccgcaacactagatctgcccccgccgtccgagccgccgcgtcagccaaagacggcgacggtgcccgctccctccacttccgccgccaacagagtgtccctgcgccgcactacgggcgcccctcggggaccgcgactgagcggcaactggcagagcacactgaacagcattgtgggcctgggagtgaaaagtgtgaagcgccgccgttgctactgaatgagcaagctagctaacgtgttatatgtgtgtatgcgtcctatgtcgccgccagaggagctgttgagccgcccgcgccgtctgcactccagcgaatttcaagatggcgaccccttcgatgatgccacagtggtcgtacatgcacatctcgggccaggacgcctcggagtacctgagccccgggctggtgcagttcgcccgcgccaccgacagctacttcagcctaagtaacaaatttaggaaccctacggtggcacccacccacgatgtgaccacggaccggtcgcagcgcctgacgctgcggtttatccccgtggatcgggaggacactgcctactcttacaaggcgcgcttcacgctagccgtgggcgacaaccgcgtgctggacatggcctccacctactttgatatccggggtgtgctggacaggggtcccacctttaagccctactcgggcactgcctacaactccctggctcctaaaggcgctcccaattcttgcgagtgggatgaaaaaactaatactgctgaagcagccattgaaaatgaagaagagctggcggatgagccagaagagcaagcagaagaggctataaaaaccaatgtgtttgcccaggcgccatattctggcaatgcaatttccaaagaaggaatacaagtaggcatagaaggcattggagagcaagtaaaagccgtatacgcagacaaaacctaccagccggaacctcaggttggagaaactcaatggaatgagactgaaataaatcatggagcaggaagggtgctgaagaagaccactcccatgaagccttgctatggttcttatgctaaacctactaatgaatatggaggccagggcatccttgtagaaaaaaatggcaaaatggaaagccaggtggaaacacagttttttgctcttgacggtgaaaatgataatagtccaaaagtggtgttgtatagcgaagatgtaaacttggatactcctgacacacacctatcatacaaacctagcgcccaagatgtaaactctaaagaaatgttgggccaacaggccatgcccaacaggccaaatcttattgcttttagggacaactttattggacttatgtactacaacagcactggcaacatgggagtgctggcaggacaggcctcccaactaaatgccgtggtagacttgcaagacagaaacacagagttgtcataccagctgatgcttgattccattggagacagatcaagatattttgccatgtggaaccaggcggttgatagttacgatccagatgttagaattattgaaaaccatggcacagaggatgaacttccaaactactgttttcctttgggaggaatatttaatactcagagttttaaaaaggtaaaacctggaacggataacggatgggaaacagatgatgacttttcagataaaaatgaaataagagttggcaacaactttgccatggagatcaatatccaggcaaacctgtggagaagcttcttgtattccaatgtggctctctacctgccagataagatgaagtactctccaaccaacatagacatttccaccaacactaacacctatgactacatgaacaaaagagtggcgcctccaggcctggtggactgctatgtcaatctgggggccaggtggtcccttgatgtaatggataacatgaacccctttaaccaccaccgcaatgcgggcctgcgataccgttccatgcttctgggtaacggccgctacgtgcccttccacatccaggtgccccaaaagttctttgccatcaaaagccttctactcttgcctggctcgtacacctacgaatggaatttcagaaaggatgtgaacatggtcctacagagctctctgggcaacgaccttagggtggatggggccagcatcaagtttgacagcatcaccctttatgctacctttttccccatggcccacaacaccgcttccacgcttgaggccatgctcagaaacgacaccaacgaccagtccttcaatgactacctctctggggccaacatgctctaccccatccccgccaacgctaccaacgtgcccatctccattccctctcgcaactgggccgccttcagaggctgggcatttacccgccttaagaccaaggagaccccctccctgggctcgggttttgacccctactttgtctactcgggatccatcccctacctggatggcaccttctacctcaaccacacttttaagaagatatccatcatgtatgactcctctgtcagctggccgggcaacgaccgcctgctcacccccaatgagttcgaggtcaagcgcgccgtggacggcgagggctacaacgtggcccagtgcaacatgaccaaggactggttcctggtgcagatgctggccaactacaacataggctaccagggcttctacatcccagagagctacaaggacaggatgtactccttcttcagaaatttccaacccatgagcaggcaggtggtggacgagaccaaatacaaggactatcaggccgttggcatcactcaccagcacaacaactcgggattcgtgggctacctggcacccaccatgcgcgagggacaggcctaccccgccaacttcccctaccccttgataggcaagaccgcggtcgacagcgtcacccagaaaaagttcctctgcgaccgcaccctctggcgcatccccttttctagcaacttcatgtccatgggcgcgctcacggacctgggccagaacctgctctatgccaactccgcccatgcgctggacatgacttttgaggtggaccccatggacgagcccacccttctctatattgtgtttgaagtgttcgacgtggtcagagtgcaccagccgcaccgcggtgtcatcgagaccgtgtacctgcgcacgcccttctcggccggcaacgccaccacctaaggagacagcgccgccgcctgcatgacgggttccaccgagcaagagctcagggccatcgccagagacctgggatgcggaccctattttttgggcacctatgacaaacgcttcccgggcttcatctcccgagacaagctcgcctgcgccatcgtcaacacggccgcgcgcgagaccgggggcgtgcactggctggcctttggctgggacccgcgctccaaaacttgctacctctttgacccttttggcttctccgatcagcgcctcaagcagatctatgagtttgagtacgaggggctgctgcgccgcagcgcgcttgcctcctcgcccgaccgctgcatcacccttgagaagtccaccgagaccgtgcaggggccccactcggccgcctgcggtctcttctgctgcatgtttttgcacgcctttgtgcgctggccccagagtcccatggatcgcaaccccaccatgaacttgctcaagggagtgcccaacgccatgctccagagcccccaggtccagcccaccctgcgccacaaccaggaacagctctaccgcttcctggagcgccactccccctacttccgcagtcacagcgcgcgcatccggggggccacctctttctgccacttgcaagaaaacatgcaagacggaaaatgatgtacagctcgctttttaataaatgtaaagactgtgcactttatttatacacgggctctttctggttatttattcaacaccgccgtcgccatctagaaatcgaaagggttctgccgcgcgtcgccgtgcgccacgggcagagacacgttgcgatactggaagcggctcgcccacttgaactcgggcaccaccatgcggggcagtggttcctcggggaagttctcgccccacagggtgcgggtcagctgcagcgcgctcaggaggtcgggagccgagatcttgaagtcgcagttggggccggaaccctgcgcgcgcgagttgcggtacacggggttgcagcactggaacaccagcagggccggattatgcacgctggccagcaggctctcgtcgctgatcatgtcgctgtccagatcctccgcgttgctcagggcgaatggggtcatcttgcagacctgcctgcccaggaaaggcggcagcccgggcttgccgttgcagtcgcagcgcaggggcatcagcaggtgcccgcggcccgactgcgcctgcgggtacagcgcgcgcatgaaggcttcgatctgcctgaaagccacctgcgccttggctccctccgaaaagaacatcccacaggacttgctggagaactggttcgcgggacagctggcatcgtgcaggcagcagcgcgcgtcggtgttggcgatctgcaccacgttgcgaccccaccggttcttcactatcttggccttggaagcctgctccttcagcgcgcgctggccgttctcgctggtcacatccatctctatcacctgctccttgttgatcatgtttgtcccgtgcagacacttcaggtcgccctccgtctgggtgcagcggtgctcccacagcgcgcaaccggtgggctcccaattcttgtgggtcacccccgcgtaggcctgcaggtaggcctgcaagaagcgccccatcatggccacgaaggtcttctggctcgtaaaggtcagctgcaggccgcgatgctcttcgttcagccaggtcttgcagatggcggccagcgcctcggtctgctcgggcagcatcctaaaatttgtcttcaggtcgttatccacgtggtacttgtccatcatggcgcgcgccgcctccatgcccttctcccaggcggacaccatgggcaggcttagggggtttatcacttccaccggcgaggacaccgtactttcgatttcttcttcctccccctcttcccggcgcgcgcccacgctgctgcgcgctctcaccgcctgcaccaaggggtcgtcttcaggcaagcgccgcaccgagcgcttgccgcccttgacctgcttaatcagcaccggcgggttgctgaagcccaccatggtcagcgccgcctgctcttcttcgtcttcgctgtctaccactatctctggggaagggcttctccgctctgcggcggtgcgcttcttttttttcttgggagcagccgtgacggagtccgccacggcgacggaggtcgagggcgtggggctgggggtgcgcggtaccagggcctcgtcgccctcggactcttcctctgactccaggcggcggcggagtcgcttctttgggggcgcgcgcgtcagcggcggcggagacggggacggggacggggacgggacgccctccacagggggtggtcttcgcgcagacccgcggccgcgctcgggggtcctctcgagctggtcttggtctcgactggccattgtatcctcctcctcctaggcagagagacataaggagtctatcatgcaagtcgagaaggaggagagcttaaccaccccctctgacaccgccgatgcgcccgccgtcgccgtcgcccccgctgccgccgacgcgcccgccacaccgagcgacacccccgcggacccccccgccgacgcacccctgttcgaggaagcggccgtggagcaggacccgggctttgtctcggcagaggaggatttgcgagaggaggagaataaggagaagaagccctcagtgccaaaagatgataaagagcaagacgagcacgacgcagatgcacaccagggtgaagtcgggcggggggacggagggcatggcggcgccgactacctagacgaagggaacgacgtgctcttgaagcacctgcatcgtcagtgcgccatcgtttgcgacgctctgcaggagcgcagcgaagtgcccctcagcgtggcggaggtcagccacgcctacgagctcagcctcttctccccccgggtgcccccccgccgccgcgaaaacggcacatgcgagcccaacccgcgcctcaacttctaccccgccttcgtggtgcccgaggtcctggccacctatcacatcttctttcaaaattgcaagatccccctctcgtgccgcgccaaccgtagccgcgccgataagatgctggccctgcgccagggcgaccacatacctgatatcgccgctttggaagatgtgccaaagatctttgagggtctgggtcgcaacgagaagcgggcagcaaactctctgcaacaggaaaacagcgaaaatgagagtcacaccggggtactggtggagctcgagggcgacaacgcccgcctggcggtggtcaagcgcagcatcgaggtcacccactttgcctaccccgcgctaaacctgccccccaaagtcatgaacgcggccatggacgggctgatcatgcgccgcggccggcccctcgctccagatgcaaacttgcatgaggagaccgaggacggccagcccgtggtcagcgacgagcagctggcgcgctggctggagaccgcggaccccgccgaactggaggagcggcgcaagatgatgatggccgcggtgctggtcaccgtagagctggagtgtctgcagcgcttcttcggcgaccccgagatgcagagaaaggtcgaggagaccctgcactacaccttccgccagggctacgtgcgccaggcttgcaagatctccaacgtggagctcagcaacctggtgtcctacctgggcatcttgcatgagaaccgcctcgggcagagcgtgctgcactccaccctgcgcggggaggcgcgccgcgactacgtgcgcgactgcgtttacctcttcctctgctacacctggcagacggccatgggggtctggcagcagtgtctggaggagcgcaacctcaaagagctggagaagctcctgcagcgcgcgctcaaagacctctggacgggctacaacgagcgctcggtggccgccgcgctggccgacctcatcttccccgagcgcctgctcaaaaccctccagcaggggctgcccgacttcaccagccaaagcatgttgcaaaacttcaggaactttatcctggagcgttctggcatcctacccgccacctgctgcgccctgcccagcgactttgtccccctcgtgtaccgcgagtgccccccgccgctgtggggtcactgctacctgttccaactggccaactacctgtcctaccacgcggacctcatggaggactccagcggcgaggggctcatggagtgccactgccgctgcaacctctgcacgccccaccgctccctggtctgcaacacccaactgctcagcgagagtcagattatcggtaccttcgagctacagggtccgtcctcctcagacgagaagtccgcggctccggggctaaaactcactccggggctgtggacttccgcctacctgcgcaaatttgtacctgaagactaccacgcccacgagatcaggttttacgaggaccaatcccgcccgcccaaggcggagctgaccgcctgcgtcatcacccagggcgagatcctaggccaattgcaagccatccaaaaagcccgccaagattttttgctgaagaagggtcggggggtgtatctggacccccagtcgggtgaggagctcaacccggttcccccgctgccgccgccgcgggaccttgcttcccaggataagcatcgccatggctcccagaaagaagcagcagcggccgccactgccgccaccccacatgctggaggaagaggaggaatactgggacagtcaggcagaggaggtttcggacgaggaggagccggagacggagatggaagagtgggaggaggacagcttagacgaggaggcttccgaagccgaagaggcagacgcaacaccgtcaccctcggccgcagccccctcgcaggcgcccccgaagtccgctcccagcatcagcagcaacagcagcgctataacctccgctcctccaccgccgcgacccacggccgaccgcagacccaaccgtagatgggacaccaccggaaccggggccggtaagtcctccgggagaggcaagcaagcgcagcgccaaggctaccgctcgtggcgcgctcacaagaacgccatagtcgcttgcttgcaagactgcggggggaacatctccttcgcccgccgcttcctgctcttccaccacggtgtggccttcccccgtaacgtcctgcattactaccgtcatctctacagcccctactgcggcggcagtgagccagagacggtcggcggcggcggcgcccgtttcggcgcctaggaagacccagggcaagacttcagccaagaaactcgcggcggccgcggcgaacgcggtcgcgggggccctgcgcctgacggtgaacgaacccctgtcgacccgcgaactgaggaaccgaatcttccccactctctatgccatcttccagcagagcagagggcaggatcaggaactgaaagtaaaaaacaggtctctgcgctccctcacccgcagctgtctgtatcacaagagcgaagaccagcttcggcgcacgctggaggacgctgaggcactcttcagcaaatactgcgcgctcactcttaaggactagctccgcgcccttctcgaatttaggcgggaacgcctacgtcatcgcagcgccgccgtcatgagcaaggacattcccacgccatacatgtggagctatcagccgcagatgggactcgcggcgggcgcctcccaagactactccacccgcatgaactggctcagtgccggcccacacatgatctcacaggttaatgatatccgcacccatcgaaaccaaatattggtggagcaggcggcgattaccaccacgccccgcaataatcccaaccccagggagtggcccgcgtccctggtgtatcaggaaattcccggccccaccaccgtactacttccgcgtgattcccaggccgaagtccaaatgactaactcaggggcgcagctcgcgggcggctgtcgtcacagggtgcggccccctcgccagggtataactcacctggagatccgaggcagaggtattcagctcaacgacgagtcggtgagctcctcgctcggtctcagacctgacgggaccttccagatagccggagccggccgatcttccttcacgccccgccaggcgtacctgactctgcagagctcgtcctcggcgccgcgctcgggcggcatcgggactctccagttcgtgcaggagtttgtgccctcggtctacttcaaccccttctccggctctcccggtcgctacccggaccagttcatctcgaactttgacgccgcgagggactcggtggacggctacgactgaatgtcgggtggacccggtgcagagcaacttcgcctgaagcacctcgaccactgccgccgccctcagtgctttgcccgctgtcagaccggtgagttccagtacttttccctgcccgactcgcacccggacggcccggcgcacggggtgcgctttttcatcccgagtcaggtgcgctctaccctaatcagggagtttaccgcccgtcccctactggcggagttggaaaaggggccttctatcctaaccattgcctgcatctgctctaaccctggattgcaccaagatctttgctgtcatttgtgtgctgagtataataaaggctgagatcagaatctactcgggctcctgtcgccatcctgtcaacgccaccgtccaagcccggcccgatcagcccgaggtgaacctcacctgcggtctgcaccggcgcctgagaaaatacctagcttggtactacaacagcactccctttgtggtttacaacagctttgaccaggacggggtctcactgagggataacctctcgaacctgagctactccatcaggaagaacagcaccctcgagctacttcctccttacctgcccgggacttaccagtgtgtcaccggtccctgcacccacacccacctgttgatcgtaaacgactctcttccgagaacagacctcaataactcctcttcgcagttccccagaacaggaggtgagctcaggaaaccccgggtaaagaagggtggacaagagttaacacttgtggggtttctggtgtatgtgacgctggtggtggctcttttgattaaggcttttccttccatgtctgaactctccctcttcttttatgaacaactcgactagtgctaacgggaccctacccaacgaatcgggattgaatatcggtaaccaggttgcagtttcacttttgattaccttcatagtcctcttcctgctagtgctgtcgcttctgtgcctgcggatcgggggctgctgcatccacgtttatatctggtgctggctgtttagaaggttcggagaccatcgcaggtagaataaacatgctgctgcttaccctctttgtcctggcgctggccgccagctgccaagccttttccgaggctgattttatagaaccccagtgcaatatcacttataaatctgaatataacctctgcactatcctaattaaatgcgttactcaacacgatgaggtaactgttagatacaaagatcaatcaaaaagagacgcactttacagcagctggcaaccaggagatgaacaaaaatacaatgtgaccgtcttccagggcaaactctccaaaacttacaattacactttcccattcgaggagatgtgtgagtttgtcatgttcatgtcaaagcagtacaagatgtggcctccgactccccagggctgtgtggaaaatccaggctctttctgcatgatctctctctgtgtaactgtgctggcactaatactcacgcttttgtatatcagatttaaatcaaggcaaagcttcatcgatgaaaagaaaatgccttaatcgcttttcacgcttgattgctaacaccgggtttttatccgcagaatgattggaatcaccctactaatcacctccctccttgcgattgcccatgggttggaacgaatcgaagtccctgtgggggccaatgttaccctggtggggcctgtcggcaatgctacattaatgtgggaaaaatatactaaaaatcaatgggtctcttactgcactaacaaaaacagccacaagcccagagccatctgcgatgggcaaaatttaaccttgattgatgttcaattgctggatgcgggctactattatgggcagctgggtacaatcgttaattactggagaccccacaaagattacatgcttcacgtagtaaagggtccccttagcagcccgaccactaccaccacctctaccacacccactaccaccactactcccatcaccagcactgccacccagcctcctcatagcagaacaaccacttttatcaattccaagtcccactccccccacattgccggcgggccctccgcctcaaactccgagaccaccgagatctgcttctgcaaatgctctgacgccattgcccaggatttggaagaccacgaggaagatgagcatgacttcgcagatgcatgccaggcatcaggggcagaagcactgccggtggccctcaaacagtatgcagactcccataccacccccgatcttccaccgccttcccagaagccaagtttcctgggggaaaatgaaacactgcctctctccatacttgctttgacatctgttgctattctgactgctctgctggtgctcctatgctctatatgctacctgatctgctgcaggaagaaaaaatctcacggccatgctcaccagccgcttatgcacttcccttaccctccagagttgggcgaccacaaactttaagtctgcagtagctatctgcccatcccttgtcagtcgacagcgatgagccccactaatctaacggcctctggacttacaacattgtctcttaatgagaccaccgctcctcaagacctgtacgatggtgtctccgcgctggttaaccagtgggatcacctgggcatatggtggctcctcataggagcagtgaccctgtgcctaatcctggtctggataatctgctgcatcaaaagcagaagacccaggcggcggcccatctacaggcccttcgtcatcacacctgaagatgatgatggcaccacgtccaggctgcagagcctaaagcagctactcttctcttttacagcatggtaaattgaacatgcctcgcattttcatctacttgtttcttcttccactctttttgggctcttctacattggcagctgtgtcccacatcgaggtagactgcatctcgcccttctcagtctacttactcttcggctttgtcatttgcaactttgtctgcagcgttatcactgtagtgatctgcttcatacagtgcatcgactacgtctgcgtacgggtggcctattttagacaccacccccagtatcgcaacagggacatagcggctctcctaagacttgtttaaatcatgcccaaattaactgtgattgctcttctgattatctgctgcgtcctagccgcgattgggactcagcctactaccaccaccaccagcgctcccagaaagagacatgtttcctgcagcttcaaacgtccctggaatataccccaatgctttactgatgaacctgaaatctctttggcttggtacttcagcgtcaccgcccttctcatcttctgcagtacggttattgcccttgccatttacccttcccttgacctgggctggaatgctgtcaactctatggaatatcccaccttcccagaaccagacctgccagacctggttgttctaaacgcgtttcctcctcctcccgttcaaaatcagtttcgccctccgtccccgacgcccactgaggtcagctactttaatctaacaggcggagatgactgaaaacctagacctagaaatggacggcctctgcagcgaacaacgcatactagagaggcgccggcaaaaagcagagctcgagcgtcttaaacaagagctccaagacgcggtggccatacaccagtgcaaaaaaggtgtcttctgtctagtgaaacaggccacgctcacctatgaaaaaacaggtgacacccaccgcctaggatacaagctgcccacacaacgccagaagttcgcccttatgataggcgaacaacccatcaccgtcacccagcactctgtggagacagaaggctgcatacacgctccctgcaggggcgctgactgtctctacaccttgatcaaaaccctctgcggccttagagacctcatccctttcaattgatcataactgtaatcaataaaaaatcacttacttgaaatctgatagcaagcctctgtccaattttttcagcaacacttccttcccctcctcccaactctggtactctaggcgcctcctagctgcaaacttcctccacagtctgaagggaatgtcagattcctcctcctgtccctccgcacccacgatcttcatgttgttgcagatgaaacgcgcgagatcgtctgacgagaccttcaaccccgtgtacccctacgataccgagatcgctccgacttctgtcccttttcccacccctccctttgtgtcccccgcaggaatgcaagaaaacccccctggagtgctatccctacgccttgcagaacccttgaccacctccaatggagcgctgaccctaaaaatggggggtggtttgaccctggacgaagaaggaaagcttacttcccaaaatattaccagtgttgatcctcctcttaaaaaaacaaaaaacaatatcagtctgcagactgcctccccccttgccgtcagctcgggagccctcacacttttcgctactcctcccctggcagttaatgacaataacctaactgtgcagtctcaggctccccttacactggaaaactcaaaactaagtctggccaccaaaggccccctaaccgtttctgaaggaaaacttgccctagaaacagaggctcccttgcatgcaagcgacagcagtagcctaggccttagtgtaacggccccactgagcattagcagcgacagcctaggactagacttgcaagcgcccattatttctgaaaatggaaaactgggcctaagagtaacaggtcccctaactgtggccagcagtattgatgctttgacagtagccacaggcagcggtattggacttgatagcaacacgcgcctacaggcaaaattggtcgcgcccctaggctttgacaccaatggcaacattaagctcagcacttcgggcggcatgagactgaacaatggcacacttatactagatgtaaactacccatttgaggctcaaggtcaacttagtctaagagtgggttcgggtccactgtatgtagactccaacacacataacctaaccgctagatgccttagagggctatacataacgtcatctaataaccaaaccggcctggaggccaacataaaacttacaaaaggacttgtgtttgatggaaatgccatagcagttaatgttagcaaagggctagaatacagtaccactgaaacagcgcagggtgtaaatcccatacagactaaaataggtttgggcatggaatatgataccaatggagccataaagccaagactaggctctggtttgagctttgataattcaggagctattgtagtgggaaacaaaaatgatgacactcttactctgtggactacaccagacccatctcccaactgtcagattaactcggaaaaagatgctaaactaaccttggtactaaccaagtgcggtagtcaaattgtaggcacagtatctgcctttgctcttaaaggcagccttgccccaattaatggcacagtgagctcagttagtatattcctaagatttaatgaaaatggggtactgatgagcaactcatcgttggaaagccaatactggaattacaggaatggaaattcaactaatgccacaccatatacaaatgcactaggttttatgcctaacctggcagcttatcccaaaggccaggcaacgactgcaaaaagcagcatcattagccaggtttacatgaatggtgacacttccaaacctatgatatttacaataacttttaatgggcttgaaacagaggaaactcaggtcagtacatattccatgacattttcatggaggtggacaaatggagactacgtggggcactattttaaaacaaactcctttactttctcctacattgcccaagaataaagaaagcacagagatgcttgtttttgatttcaaaattgtgtgcttttatttatttcaagcttacagtatttccagtagtcattcgaatagagcttaattaaactgcatgagaacccttccacatagcttaaattagcaccagtgcaaatggagaaaaatcaacatacctttttatccagatatcagagaactctagtggtcagttttcccccaccctcccagctcacagaatacacagtcctttccccccggctggctttaaacaacactatctcattggtaacagacatattcttaggtgtaataatccacacggtctcttggcgggccaaacgctggtcggtgatgttaataaactccccaggcagctctttcaagttcacgtcgctgtccaactgctgaagcgctcgcggctccgactgcgcctctagcggaggcaacggcaacacccgatccttgatctataaaggagtagagtcataatcccccataagaatagggcggtgatgcagcaacaaggcgcgcagcaactcctgccgccgcctctccgtacggcaggaatgcaacggcgtggtggtctcctccgcgataatccgcaccgctcgcagcatcagcatcctcgtcctccgggcacagcagcgcatcctgatctcactgagatcggcgcagtaagtgcagcacaaaaccaagatgttatttaagatcccacagtgcaaagcgctgtacccaaagctcatggcgggaaggacagcccccacgtgaccatcataccagatcctcaggtaaatcaaatgacgacctctcataaacacgctggacatgtacatcacctccttgggcatgtgctgattcaccacctctcgataccacaagcatcgctgattaattaaagacccctcgagcaccatcctgaaccaggaagccagcacctgaccccccgccaggcactgcagggaccccggtgaatcgcagtggcagtgaagactccagcgctcgtagccgtgaaccatagagctggtcattatatccaaattggcacaacacagacacactttcatacactttttcatgattagcagctcctctctagtcaggaccatatcccaaggaatcacccactcttgaatcaaggtaaatcccacacagcagggcaggcctctcacataactcacgttatgcatagtgagcgtgtcgcaatctggaaataccggatgatcttccatcaccgaagcccgggtctccgtctcaaagggaggtaaacggtccctcgtgtagggacagtggcgggataatcgagatcgtgttgaacgtagagtcatgccaaagggaacagcggacgtactcatatttcctccagcagaaccaagtgcgcgcgtggcagctatccctgcgtcttctgtctcgccgcctgccccgttcggtgtagtagttgtaatacagccactccctgagaccgtcaaggcgctccctggcgtccggatctatgacaacaccgtcctgcagcgccgccctgatgacatccaccaccgtagagtatgccaagcccagccaggaaatgcattcactttgacagcgagagataggaggagcggggagagatggaagaaccatgatagtaaagagaacttttattccaatcgatcttctaagatatcaaagtggagatctataagatgacactggtctcctccgctgagtcgatcaaaaataacagctaaaccacaaacaacacgattggtcaaatgctccacaagggcctgcagcataaaattgcctcggaactccaccgcaagcataacatcaaagccaccgcctctatcgtgatcaagaataaaaaccccacagctatccaccagacccatatagttttcatctctccatcgtgaaaaaagatttacaagctcctcctttaaatcacctccaaccaattgaaaaagttgaaccagaccgccctccaccttcattttcagcaagcgtatcatgattgcaaaaattcaggctcctcagacacctgtataagattgagaagcggaacgttaacatcgatgtttcgctcgcgtaaatcacgcctcagtgcaagcataatataatcccacaggtcggagcggatcagcgaggacacctccccgccaggaaccaactcaacggagcctatgctgattataatacgcatattcggagctatgctaaccagcacggcccccaaataggcgtactgcataggcggcgacaaaaagtgaacagtttgggttaaaaaatcaggcaaacactcgcgcaaaaaagcaagaacatcataaccatgctcatgcaaatagatgcaagtaagctcaggaacgaccacagaaaaatgcacaatttttctctcaaacatgactgcgagccctgcaaaaaataaaaaagaaacattacacaagagtagcctgtcttacgatgggatagactactctaaccaacataagacgggccacaacatcgcccgcgtggccataaaaaaaattgtccgtgtgattaaaaagaagcacagatagctggccagtcatatccggagtcatcacgtgtgaacccgtgtagacccccgggttggacacatcggccaaagaaagaaagcggccaatgtacccaggaggaattataacactaagacgaagatacaacagaataaccccatgagggggaataacaaagttagtaggtgaataaaaacgataaacacccgaaactccctcctgcgtaggcaaaatagcaccctccccttccaaaacaacatatagcgcttccacagcagccatgacaaaagactcaaaacactcaaaagactcagtcttaccaggaaaataaaagcactctcacagcaccagcactaatcagagtgtgaaaagggccaagtgccgaacgagtatatataggaataaaaaatgacgtaaatgtgtaaaggtcagaaaacgcccagaaaaatacacagaccaacgcccgaaacgaaaacccgcgaaaaaatacccagaacttcctcaacaaccgccacttccgctttctcacgatacgtcacttccgcaagaaaagcaaaactacatttcccacatgtgtaaaaacgaaaccccgccccttctaaccgcccacaacttacatcatcaaaacgtaaagtcctacgtcacccgccccgcctctccccgcccacctcattatcatattggccacaatccaaaataaggtatattat

SEQ ID NO: 56 - DNA, 37058 bp, Gorilla beringei graueri
ataatataccttattttggattgtggccaatatgataatgaggtgggcggggagaggcggggcgggtgacgtaggacgcgcgagtagggttgggaggtgtggcggaagtgtggcatttgcaagtgggaggagctcacatgcaagcttccgtcgcggaaaatgtgacgtttttgatgagcgccgcctacctccggaagtgccaattttcgcgcgcttttcaccggatatcgtagtaattttgggcgggaccatgtaagatttggccattttcgcgcgaaaagtgaaacggggaagtgaaaactgaataatagggcgttagtcatagcgcgtaatatttaccgagggccgagggactttgaccgattacgtggaggactcgcccaggtgttttttacgtgaatttccgcgttccgggtcaaagtctccgtttttattgtcaccgtcatttgacgcggagggtatttaaacccgctgcgctcctcaagaggccactcttgagtgccagcgagaagagttttctcctctgctccgcttcggtgatcgaaaaatgagacacatagcctgcactccgggtcttttgtccggtcgggcggcggccgagcttttggacgctttgatcaatgatgtcctgagcgatgattttccgtctactacccactttagcccacctactcttcacgaactgtacgatctggatgtactggtggatgtgaacgatcccaacgaggaggcggtttctgcgttttttcccgagtctgcgctgttggccgctcaggagggatttgacctacacactccgccgcctattttagagtctccgctgccggagcccagtggtataccttatatgcctgaactgcttcccgaagtggtagacctgacctgccacgagcctggctttccgcccagcgacgatgatggtgagccttttgttttagactttgctgagatacctgggcacggttgcaggtcttgtgcatatcatcagagggttaccggagaccccgaggttaagtgttcgctgtgctatatgaggatgacctcttcctttatctacagtaagtttttgtctaggtgggcttttgggtaggtgggttttgtgtcagaacaggtgtaaacgttgcttgtgttttttgtacctgtaggtccggtgtccgagccagacccggagcccgaccgcgatcccgagccggatcccgagcctcctcgcaggacaaggaaactaccttccattctgtgcaagtctcagacacctgtaaggaccagcgaggcagacagcaccgactctggcacttctacctctccccctgaaattcacccagtggttcctctgggtatacataaacctgttgctgttagagtttgcgggcgacgccctgcagtacagtgcattgaggacttgcttcacgatcccgaggaacctttggacttgagccttaaacgccctaggcaataaaccccacctaagtaataaaccccacctaagtaataaaccctgccgcccttggttattgagatgacgcccaatgtttgcttttgaatgacttcatgtgtgtaataaaagtgagtgtgatcataggtctcttgtttgtctgggcggggcttaagggtatataagtttctcggggctaaacttggttacacttgaccccaatggaggcgtgggggtgcttggaggagtttgcggacgtgcgccgtttgctggacgagagctctaaccatacctatactatttggaggtatctgtggggctctactcaggccaagttggtctccagaattaagcaggattacaagtgcgattttgaagagctttttagttcctgcggtgagcttttgcaatccttgaatctgggccatcaggctattttccaggaaaaggttctctcgactttggatttttccactcccgggcgcaccgccgcttgtgtggcttttgtgtcttttgtgcaagataaatggagcgaggagacccacctgagtcacggctacgtactggatttcatggcgatggctctttggagggctcacaacaaatggaagattcagaaggaactgtacggttccgccctacgtcgtccacttttgtcgcgacaggggctgaggtttcccgaccatcggcagcatcagaatctggaagacgagtcggaggagcgagcggaggagaagatcagcttgagagccggcctggaccctcctcaggaggaatgaatctcccgcaggtggttgacctgtttccagaactgagacgggtcctgactatcagggaggatggtcagtttgtgaagaagtttaagagggatcggggtgagggagatgatgaggcggctagcaatttagcttttagtctgatgactcgccaccgaccggaatgtattacctatcagcagattaaggagagttgtgccaacgagctggatcttttgggtcagaagtatagcatagaacagcttaccacttactggcttcagcctggggatgattgggaagaggcgatcagggtgtatgcaaaggtggccctgcggcccgattgcaagtataagattactaagttggttaatattagaaactgctgctatatttctgggaacggggccgaagtggagatagatactcaggacagggtggcttttaggtgttgcatgataaacatgtggcccgggatactggggatggatggggtggtgttcatgaatgtgaggtttacgggccccaactttaatggcacggtgttcatgggcaacaccaacttgctcctgcatggtgcgagtttctatgggtttaataacacctgtatagaggcctggaccgatgtaaaggttcgaggttgttccttttatagctgttggaaggcggtggtgtgtcgccctaaaagcaggggttctgtgaaaaaatgcttgtttgaaaggtgcaccttaggcatcctctctgagggcaactccagggtgcgccataatgtggcttcgaactgcggttgcttcatgcaagtgaagggggtgagcgttatcaagcataactcggtgtgtggaaactgcgaggatcgcgcctcccagatgctgacctgctttgatggtaactgtcacctgttgaagaccattcatataagcagccaccccagaaaggcctggcccgtgtttgagcataacatcctgacccgctgctccttgcatctgggggtcaggaggggtatgttcctgccttaccagtgtaactttagccacactaaaatcctgctggaacccgagtgtatgaccaaggtcagcctaaatggcgtgtttgatgcgactctgagaatctggaaggtgctgaggtatgatgagaccaggaccaggtgccgaccctgcgagtgcggcggcaagcacatgagaaatcagcctgtgatgttggatgtgaccgaggagcttaggcctgaccatctggtgctggcctgcaccagggccgagtttgggtctagcgatgaggataccgattgaggtgggtaaggtgggcgtggctagaagggtggggcgtgtataaattgggggtctaagggtctctctgttttgtcttgcaacagccgccgccatgagcgacaccggcaacagctttgatggaagcatctttagcccctatctgacagtgcgcatgcctcactgggctggagtgcgtcagaatgtgatgggttccaacgtggatggacgccccgttctgccttcaaattcgtctacaatggcctacgcgaccgtgggaggaactccgctggacgccgcgacctccgccgccgcctccgccgccgccgcgaccgcgcgcagcatggctacggacctttacagctctttggtggcgagcagcgcggcctctcgcgcgtctgctcgggatgagaaactgaccgctctgctgcttaaactggaagacttgacccgggagctgggtcaactgacccagcaggtctccagcttgcgtgagagcagccttgcctccccctaatggcccataatataaataaaagccagtctgtttggattaagcaagtgtatgttctttatttaactctccgcgcgcggtaagcccgggaccagcggtctcggtcgtttagggtgcggtggattctttccaacacgtggtacaggtggctctggatgtttagatacatgggcatgagtccatccctggggtggaggtagcaccactgcagagcttcgtgctcgggggtggtgttgtatatgatccagtcgtagcaggagcgctgggcgtggtgctgaaaaatgtccttaagcaagaggcttatagctagggggaggcccttggtgtaagtgtttacaaatctgctcagttgggaggggtgcatccggggggatataatgtgcatcttggactggatttttaggttggctatgttcccacccagatcccttctgggattcatgttgtgcaggaccaccagcacggtatatccagtgcacttgggaaatttatcgtggagcttagacgggaatgcatggaagaacttggagacgcccttgtggcctcccagattttccatacattcgtccatgatgatggcaatgggcccgtgggaagctgcctgagcaaaaatgtttctgggatcgctcacatcgtagttatgttccagggtgaggtcatcataagacatctttacaaatcgggggcggagggtcccggactggggtatgatggtaccctcgggccccggggcgtagttcccctcacagatctgcatctcccaggctttcatttcagagggagggatcatatccacctgcggagcgatgaaaaacacagtttctggcgcaggggagattaactgggatgagagcaggtttctgagcagctgtgactttccacagccggtgggcccatatatcacgcctatcaccggctgcagctggtagttaagagagctgcagctgccgtcctcccggagcaggggggccacctcgttcagcatatccctgacgtggatgttctccctgaccaattccgccagaaggcgctcgccgcccagcgaaagcagctcttgcaaggaagcaaaatttttcagcggttttaggccgtcggccgtgggcatgtttttcagcgtctgggtcagcagttccagcctgtcccacagctcggtgatgtgctctacggcatctcgatccagcagatctcctcgtttcgcgggttggggcggctttcgctgtagggcaccagccgatgggcgtccagcggggccagagtcatgtccttccatgggcgcagggtcctcgtcagggtggtctgggtcacggtgaaggggtgcgctccgggttgggcgctggccagggtgcgcttgaggctggttctgctggtgctgaatcgctgccgctcttcgccctgcgcgtcggccaggtagcatttgaccatggtctcgtagtcgagaccctcggcggcgtgccccttggcgcggagctttcccttggaggtggcgccgcacgaggggcactgcaggctcttcagggcgtagagcttgggagcgagaaacacggactctggggagtaggcgtccgcgccgcaggaagcgcagaccgtctcgcattccaccagccaagtgagctccgggcggtcagggtcaaaaaccaggttgcccccatgctttttgatgcgtttcttacctcggctctccatgaggcggtgtcccttctcggtgacgaagaggctgtccgtgtccccgtagaccgacttcaggggcctgtcttccagcggagtgcctctgtcctcctcgtagagaaactctgaccactctgagacgaaggcccgcgtccaggccaggacgaaggaggccacgtgggaggggtagcggtcgttgtccactagcgggtccaccttctccagggtgtgcaggcacatgtccccctcctccgcgtccagaaaagtgattggcttgtaggtgtaggacacgtgaccgggggttcccgacgggggggtataaaagggggtgggcgccctttcatcttcactctcttccgcatcgctgtctgcgagagccagctgctggggtaagtattccctctcgaaggcgggcatgacctcagcgctcaggttgtcagtttctaaaaatgaggaggatttgatgttcacctgtcctgaggtgatacctttgagggtacctgggtccatctggtcagaaaacactatttttttgttgtcaagcttggtggcgaacgacccgtagagggcgttggagagcagcttggcgatggagcgcagggtctggtttttgtcgcggtcggctcgctccttggccgcgatgttgagttgcacgtactcgcgggccacgcacttccactcggggaagacggtggtgcgctcgtctgggatcaggcgcaccctccagcctcggttgtgcagggtgaccatgtcgacgctggtggcgacctcgccgcgcaggcgctcgttggtccagcagaggcggccgcccttgcgcgagcagaaggggggtagggggtccagctggtcctcgtttggggggtccgcgtcgatggtgaagaccccggggagcaagcgcgggtcaaagtagtcgatcttgcaagcttgcatgtccagagcccgctgccattcgcgggcggcgagcgcgcgctcgtaggggttgaggggcgggccccagggcatggggtgggtgagcgcggaggcgtacatgccgcagatgtcatacacgtacaggggttccctgaggatgccgaggtaggtggggtagcagcgccccccgcggatgctggcgcgcacgtagtcatagagctcgtgggagggggccagcatgttgggcccgaggttggtgcgctgggggcgctcggcgcggaaggcgatctgcctgaagatggcatgggagttggaggagatggtgggccgctggaagacgttgaagcttgcttcttgcaagcccaccgagtccctgacgaaggaggcgtaggactcgcgcagcttgtgcaccagctcggcggtgacctggacgtcgagcgcgcagtagtcgagggtctcgcggatgatgtcatacttatcctcccccttctttttccacagctcgcggttgaggacgaactcttcgcggtctttccagtactcttggaggggaaacccgtccgtgtccgaacggtaagagcctagcatgtagaactggttgacggcctggtaggggcaacagcccttctccacgggcagcgcgtaggcctgcgccgccttgcggagggaggtgtgggtgagggcgaaagtgtccctgaccatgactttgaggtattgatgtttgaagtctgtgtcatcgcagccgccctgttcccacagggtgtagtccgtgcgctttttggagcgcgggttgggcagggagaaggtgaggtcattgaagaggatcttccccgctcgaggcatgaagtttctggtgatgcgaaagggccctgggaccgaggagcggttgttgatgacctgggcggccaggacgatctcgtcaaagccgtttatgttgtggcccacgatgtagagctccaaaaagcggggctggcccttgatggaggggagctttttgagttcctcgtaggtgagctcctcgggcgattccaggccgtgctcctccagggcccagtcttgcaagtgagggttggccgccaggaaggatcgccagaggtcgcgggccatgagggtctgcaggcggtcgcggaaggttctgaactgtcgccccacggccatcttttcgggggtgatgcagtagaaggtgagggggtctttctcccaggggtcccatctgagctctcgggcgaggtcgcgcgcggcggcgaccagagcctcgtcgccccccagtttcatgaccagcatgaagggcacgagctgcttgccaaaggctcccatccaagtgtaggtctctacatcgtaggtgacaaagaggcgctccgtgcgaggatgagagccgatcgggaagaactggatctcccgccaccagttggaggattggctgttgatgtggtgaaagtagaagtcccgtctgcgggccgagcactcgtgctggcttttgtaaaagcgaccgcagtactggcagcgctgcacgggttgtatatcttgcacgaggtgaacctggcgacctctgacgaggaagcgcagcgggaatctaagtcccccgcctggggtcccgtgtggctggtggtcttctactttggttgtctggccgccagcatctgtctcctggagggcgatggtggagcagaccaccacgccgcgagagccgcaggtccagatctcggcgctcggcgggcggagtttgatgacgacatcgcgcacattggagctgtccatggtctccagctcccgcggcggcaggtcagctgggagttcctggaggttcacctcgcagagacgggtcaaggcgcgggcagtgttgagatggtatctgatttcaaggggcgtgttggcggcggagtcgatggcttgcaggaggccgcagccccggggggccacgatggttccccgcggggcgcgaggggaggcggaagctgggggtgtgttcagaagcggtgacgcgggcgggcccccggaggtagggggggttccggccccacgggcatgggcggcaggggcacgtcttcgccgcgcgcgggcaggggctggtgctggctccgaagagcgcttgcgtgcgcgacgacgcgacggttggtgtcctgtatctggcgcctctgagtgaagaccacgggtcccgtgaccttgaacctgaaagagagttcgacagaatcaatctcggcatcgttgacagcggcctggcgcaggatctcctgcacgtcgcccgagttgtcctggtaggcgatctctgccatgaactgctcgatctcttcctcctggagatctcctcgtccggcgcgctccacggtggccgccaggtcgttggagatgcgacccatgagctgcgagaaggcgttgagcccgccctcgttccagacccggctgtagaccacgcccccctcggcgtcgcgggcgcgcatgaccacctgggccaggttgagctccacgtgtcgcgtgaagacggcgtagttgcgcaggcgctggaaaaggtagttcagggtggtggcggtgtgctcggcgacgaagaagtacatgacccagcgccgcaacgtggattcattgatgtcccccaaggcctccaggcgctccatggcctcgtagaagtccacggcgaagttgaaaaactgggagttgcgagcggacacggtcaactcctcctccagaagacggatgagctcggcgacagtgtcgcgcacctcgcgctcgaaggccacggggggcgcttcttcctcttccacctcttcttccatgatcgcttcttcttcttcctcagccgggacgggagggggcggcggcggcgggggaggggcgcggcggcggcggcggcgcaccgggaggcggtcgatgaagcgctcgatcatctccccccgcatgcggcgcatggtctcggtgacggcgcggccgttctcccgggggcgcagctcgaagacgccgcctctcatctcgccgcggggcgggcggccgtgaggtagcgagacggcgctgactatgcatcttaacaattgctgtgtaggtacgccgccgagggacctgattgagtccagatccaccggatccgaaaacctttggaggaaagcgtctatccagtcgcagtcgcaaggtaggctgagcaccgtggcgggcgggggcgggtctggagagttcctggcggagatgctgctgatgatgtaattaaagtaggcggtcttgagaaggcggatggtggacaggagcaccatgtctttgggtccggcctgttggatgcggaggcggtcggccatgccccaggcctcgttctgacaccggcgcaggtctttgtagtagtcttgcatgagtctttccaccggcacctcttctccttcctcttctccatctcgccggtggtttctcgcgccgcccatgcgcgtgaccccaaagcccctgagcggctgcagcagggccaggtcggcgaccacgcgctcggccaagatggcctgctgcacctgagtgagggtcctctcgaagtcatccatgtccacgaagcggtggtaggcgcccgtgttgatggtgtaggtgcagttggccatgacggaccagttgacggtctggtgtcccggctgcgagagctccgtgtaccgcaggcgcgagaaggcgcgggaatcgaacacgtagtcgttgcaagtccgcaccagatactggtagcccaccaggaagtgcggcggaggttggcgatagaggggccagcgctgggtggcgggggcgccgggcgccaggtcttccagcataaggcggtggtatccgtagatgtacctggacatccaggtgatgccggcggcggtggtggtggcgcgcgcgtagtcgcggacccggttccagatgtttcgcaggggcaagaagtgttccatggtcggcacgctctggccggtgaggcgcgcgcagtcgttgacgctctatacacacacaaaaacgaaagcgtttacagggctttcgttctgtagcctggaggaaagtaaatgggttgggttgcggtgtgccccggttcgagaccaagctgagctcggccggctgaagccgcagctaacgtggtattggcagtcccgtctcgacccaggccctgtatcctccaggatacggtcgagagcccttttgctttcttggccaagcgcccgtggcgcgatctgggatagatggtcgcgatgagaggacaaaagcggctcgcttccgtagtctggagaaacaatcgccagggttgcgttgcggcgtaccccggttcgagcccctatggcggcttggatcggccggaaccgcggctaacgagggccgtggcagccccgtcctcaggaccccgccagccgacttctccagttacgggagcgagccccttttgtttttttattttttagatgcatcccgtgctgcggcagatgcgcccctcgccccggcccgatcagcagcagcaacagcaggcatgcagacccccctctcccctttccgccccggtcaccacggccgcggcggccgtgtcgggcgcggggggcgcgctggagtcagatgagccaccgcggcggcgacctaggcagtatctggacttggaagagggcgagggactggcgcggctgggggcgaactctccagagcgccacccgcgggtgcagttgaaaagggacgcgcgcgaggcgtacctgccgcggcagaacctgtttcgcgaccgcgggggcgaggagcccgaggagatgcgagactgcaggttccaagcggggcgcgagctgcggcgcgggctggacagacagcgcctgctgcgcgaggaggactttgagcccgacacgcagacgggcatcagccccgcgcgcgcgcacgtagccgcggccgacctggtgaccgcctacgagcagacggtgaaccaggagcgcaacttccaaaagagcttcaacaaccacgtgcgcacgctggtggcgcgcgaggaggtgaccctgggtctcatgcatctgtgggacctggtggaggcgatcgtgcagaaccccagcagcaagcccctgaccgcgcagctgttcctggtggtgcagcacagcagggacaacgaggccttcagggaggcgctgctgaacatcaccgagccggaggggcgctggctcctggacctgataaacatcctgcagagcatagtggtgcaggagcgcagcctgagcctggccgagaaggtggcggccatcaactactctatgctgagcctgggcaagttctacgcccgcaagatctacaagaccccctacgtgcccatagacaaggaggtgaagatagacagcttctacatgcgcatggcgctgaaggtgctgaccctgagcgacgacctgggagtgtaccgcaacgagcgcatccacaaggccgtgagcgccagccggcggcgcgagctgagcgaccgcgagctgatgcacagtctgcagcgcgcgctgaccggcgcgggcgagggcgacagggaggtcgagtcctacttcgacatgggggccgacctgcactggcagccgagccgccgcgccctggaggcggcgggggcgtacggcggccccctggcggacgatgaccaggaagaggaggactatgagctagaggagggcgagtacctggaggactgacctggctggtggtgttttggtatagatgcaagatccgaacgtggcggacccggcggtccgggcggcgctgcagagccagccgtccggcattaactcctctgacgactgggccgcggccatgagtcgcatcatggccctgaccgcgcgcaaccccgaggctttcaggcagcagcctcaggccaaccggctggcggccatcttggaagcggtagtgcccgcgcgctccaaccccacccacgagaaggtgctggccatagtcaacgcgctggcggagagcagggccatccgcgcggacgaggccggactggtgtacgatgcgctgctgcagcgggtggcgcggtacaacagcggcaacgtgcagaccaacctggaccgcctggtgacggatgtgcgcgaggccgtggcgcagcgcgagcgcttgcatcaggacggtaacctgggctcgctggtggcgctaaacgccttcctcagcacccagccggccaacgtaccgcgggggcaggaggactacaccaactttttgagcgcgctgcggctgatggtgaccgaggtccctcagagcgaggtgtaccagtcggggcccgactacttcttccagaccagcagacagggcttgcaaaccgtgaacctgagccaggctttgaagaacctgcgggggctgtggggagtgaaggcgcccaccggcgaccgggctacggtgtccagcctgctaacccccaactcgcgcctgctgctgctgctgatcgcgcccttcacggacagcgggagcgtctcgcgggaaacctatctgggccacctgctgacgctgtaccgcgaggccatcgggcaggcgcaggtggacgagcacaccttccaagagatcaccagcgtgagccacgcgctggggcaggaggacacgggcagcctgcaggcgaccctgaactacctgctgaccaacaggcggcagaagattcccacgctgcacagcctgacgcaggaggaggagcgcatcttgcgctacgtgcagcagagcgtgagcctgaacctgatgcgcgacggcgtgacgcccagcgtggcgctggacatgaccgcgcgcaacatggaaccgggcatgtacgcctcccaccggccgttcattaaccgcctgatggactacttgcatcgggcggcggccgtgaaccccgagtacttcactaatgccattctgaatccccactggatgccccctccgggtttctacaacggggacttcgaggtgcccgaggttaacgacgggttcctctgggatgacatggatgacagtgtgttctcacccaacccgctgcgcgccgcgtctctgcgattgaaggagggttctgacagggaaggaccgaggagtctggcctcctccctggctctgggagcggtgggcgcggcggcgcggggcagtagccccttccccagcctggcagactctctgaacagcgggcgggtgagcaggccccgcttgctaggcgaggaggagtatctgaacaactccctgctgcagcccgcgagggacaaaaacgctcagcggcagcagtttcccaacaatgggatagagagcctggtggacaagatgtccagatggaagacgtatgcgcaggagtacaaggagtgggaggaccgccagccgcggcccctgccgccccctaggcagcgctggcagcggcgcgcgtccaaccgccgctggaggcaggggcccgaggacgatgatgactctgcagatgacagcagcgtgctggacctgggcgggagcgggaaccccttttcgcacctgcgcccccgcctgggcaagatgttttaaaagagaaaaaataaaaactcaccaaggccatggcgacgagcgttggttttttgttcccttccttagtatgcgacgcgcggcgatgttcgaggaggggcctcccccctcttacgagagcgcgatgggattttctcctgcgacgcccctacagcctccctacgtgcctcctcggtacctgcaacctaccgggggaagaaatagcatctgttactctgagctgcagcccctgtatgacaccaccaaagtgtacctggtggacaacaagtctgcggacgtggcctccctgaactaccagaacgaccacagcgattttttgaccaccgtgatccaaaacaatgacttcaccccaaacgaggccagcacccagaccataaacctggacaacaggtcgcactggggcggtgatctgaagaccatcttgcacaccaacatgcccaacgtgaatgagtttatgtttactaactcttttaaggcgcgggtaatggtggcgcgcgacgataagggagtgcctaaatacgagtgggtggactttacactgcccgagggcaactactccgagatcatgactcttgacctgatgaacaacgcgatcgtggagcactacttgaaagtaggcaggcagaacggggtaaaagaaagcgatattggagttaagtttgacaccaggaactttcgcctgggatgggaccccgagacggggttggttatgcccggggtttacactaatgaagcttttcaccccgatatagtgctcttgcccggatgcggggtggacttcacccaaagccggctgagcaacctgctgggcattcgaaagcgccagccattccaggaggggtttcaaatcacttatgagcatttggaagggggcaacattccggcgcttctggatttggtcgcctacgaggagagtttgaaatccgaggaaagcggggataacactgacaagggcggcgaggagcaagccggcgatggcgacactgcttcggtagaaaacgaaagtgcgtccgtggtggaggcggcggcggtagcgaccgcagagccggagaccgtagaggaggatatgaatgatagcgcaatcagaggagactcgtttattccccggggcgaagaaaagaaggcggaggctgcggcagcagtcgaagcagagcccaaagtcgagtcggagatcatggaggaggatttgaatgataacgcgatcagaggtgatacgtttgtgccgcggggcgaagaaaaaaaagcggaggcggaggccgcggctgaggaggcggccgaggctgtggcagccaccgcggcggtgactgaaacaactgaggagcaggttcaggccgagcaggttcaaaagaagcccgtgattaaagccctaacacaagatagcaaggagcgcagttacaacttgattcccggtagtactgacaccgagtaccgcagctggtacctggcatacaactacggcgacccggtcaaaggggtgcgctcgtggactctgctttgcacgccggacgtcacctgcggctccgagcagatgtactggtcgttgccaaacatgatgcaagacccggtgaccttccgctccacgcggcaggttaacaacttcccggtggtgggcgccgaactgctgcccgtgcactccaagagcttttacaacgagcaggccgtgtactcccagctgatccgccaggccacctctctgacccacgtgttcaatcgctttcccgagaaccagattttggcgcgcccgccggcccccaccatcactaccgtcagtgaaaacgttcctgctctcacagatcacgggacgctaccgctgcgcaacagcatctcaggagtccagcgagtgaccattactgacgccagacgccggacctgcccctacgtttacaaggccttgggcatagtctcgccgcgcgtcctctccagccgcactttttaaaacacatattcacccacgcttcaaagattatgtctatacttatctcacccagcaataacaccggctgggggctgcgcgcgcccagcaagatgtttggaggggcgagaaaacgttccgagcagcacccagtgcgcgtgcgcggccactaccgcgcgccctggggagcgcacaagcgcgggcgcgcagggcgcaccactgtggacgacgccattgactccgtagtggagcaggcgcgccactacacacccggcgcgccgtccgcccccgccgtgtccaccgtggacgaggcgatcgaaagcgtggtacagggcgcgcggcactatgccaaccttaaaaatcgccgccgtcgcgtggcccgccgccatcgccggagaccccgggccaccgccgccgcgcgccttgctaaggctctactcaggcgcgccaggcgaactggccgccgggccgccatgagggccgcacggcgggctgccgccagtgcggccgccgcggccccacgggcacgaaggcgcgcggccgctgccgccgccgccgccatttccagcttggcctcaacgcggcgcggtaacatatactgggtgcgcgactcgataaccggcacgcgggtacccgtgcgctttcgccccccgcggaattagcacaagacaacatacacactgagtctcctgctgttgtgtatcccagcggcgaccgtcagcagcggcgacatgtccaagcgcaaaattaaagaagagatgctccaggtcatcgcgccggagatctatgggcccccgaagaaggaggaggatgattacaagccccgcaagctaaagcgggtcaaaaagaaaaagaaagatgatgatgatgacgaggcggtggagtttgtccgccgcatggcacccaggcgccccgtgcagtggaagggtcggcgcgtgcagcgcgttttgcgccccggcaccgcggtggtcttcacgcccggcgagcgctccacgcgcactttcaagcgggtgtacgatgaggtgtacggcgacgaggacctgttggagcaggccaaccagcgctttggggagtttgcatatgggaaacggccccgcgagagtctaaaagaggacctgctggcgctaccgctggacgagggcaatcccaccccgagtctgaagccggtgaccctgcaacaggtgctgcctttgagcgcgcccagcgagcataagcgagggttgaagcgcgagggcggggacctggcgcccaccgtgcagttgatggtgcccaagcggcagaagctggaggacgtgctggagaaaatgaaagtagagcccgggatccagcccgagatcaaggtccgccccatcaagcaggtggcgcccggcgtgggagtccagaccgtggacgttaggattcccacggaggagatggaaacccaaaccgccactccctcttcagcggccagcgccaccaccggcaccgcttcggtagaggtgcagacggacccctggctacccgccgccgctgtcgccgccgccgccgccccccgttctcgcgggcgcaagagaaattatccagtggccagcgcgctcatgccccagtacgcactgcatccatccatcgcgcccacccccggctaccgcgggtattcgtaccgcccgcgcagatcggccggcactcgcggccgccgccgccgtgcgaccacaaccagccgccgccgtcgccgccgccgccagccagtgctgacccccgtgtctgtaaggaaggtggctcgctcggggagcacgctggtggtgcccagagcgcgctaccaccccagcatcgtttaaagccggtctctgtatggttcttgcagatatggccctcacttgtcgcctccgcttcccggtgccgggataccgaggaagaactcaccgccgcagaggcatggcgggcagcggtctccgcggcggccgtcgccatcgccggcgcgcaaaaagcaggcgcatgcgcggcggtgtgctgcctctgctaatcccgctaatcgccgcggcgatcggtgccgtacccgggatcgcctccgtggccctgcaggcgtcccagaaacgttgactcttgcaaccttgcaagcttgcatttttttggaggaaaaaataaaaaagtctagactctcacgctcgcttggtcctgtgactattttgtagaaaaaagatggaagacatcaactttgcgtcgctggccccgcgtcatggctcgcgcccgttcatgggagactggacagatatcggcaccagcagtatgagcggtggcgccttcagctggggcagtctgtggagcggccttaaaaattttggttccaccattaaaaactatggcaacaaagcgtggaacagcagcacgggccagatgctaagagacaagttgaaagagcagaacttccaggagaaggtggcgcagggcctggcctctggcatcagcggggtggtggacatagctaaccaggccgtgcagaaaaagataaacagtcatctggacccccgccctcaggtggaggaaacgcctccagccatggagacggtgtttcccgagggcaaaggcgaaaagcgcccgcggcccgacagggaagagaccctggtgtcacacaccgaggagccgccctcttacgaggaggcactcaaggccggcctgcccaccactcgccccgtagctcccatggccacaggtgtggtgggccataaacaacacacccccgcaacactagatctgcccccgccgtccgagccgccgcgtcagccaaagacggcgacggtgcccgctccctccacttccgccgccaacagagtgtccctgcgccgcactacgggcgcccctcggggaccgcgactgagcggcaactggcagagcacactgaacagcattgtgggcctgggagtgaaaagtgtgaagcgccgccgttgctactgaatgagcaagctagctaacgtgttatatgtgtgtatgcgtcctatgtcgccgccagaggagctgttgagccgcccgcgccgtctgcactccagcgaatttcaagatggcgaccccttcgatgatgccacagtggtcgtacatgcacatctcgggccaggacgcctcggagtacctgagccccgggctggtgcagttcgcccgcgccaccgacagctacttcagcctaagtaacaaatttaggaaccctacggtggcacccacccacgatgtgaccacggaccggtcgcagcgcctgacgctgcggtttatccccgtggatcgggaggacactgcctactcttacaaggcgcgcttcacgctagccgtgggcgacaaccgcgtgctggacatggcctccacctactttgatatccggggtgtgctggacaggggtcccacctttaagccctactcgggcactgcctacaactccctggctcctaaaggcgctcccaattcttgcgagtgggatgaaaaaactaatactgctgaagcagccattgaaaatgaagaagagctggcggatgagccagaagagcaagcagaagaggctataaaaaccaatgtgtttgcccaggcgccatattctggcaatgcaatttccaaagaaggaatacaagtaggcatagaaggcattggagagcaagtaaaagccgtatacgcagacaaaacctaccagccggaacctcaggttggagaaactcaatggaatgagactgaaataaatcatggagcaggaagggtgctgaagaagaccactcccatgaagccttgctatggttcttatgctaaacctactaatgaatatggaggccagggcatccttgtagaaaaaaatggcaaaatggaaagccaggtggaaacacagttttttgctcttgacggtgaaaatgataatagtccaaaagtggtgttgtatagcgaagatgtaaacttggatactcctgacacacacctatcatacaaacctagcgcccaagatgtaaactctaaagaaatgttgggccaacaggccatgcccaacaggccaaatcttattgcttttagggacaactttattggacttatgtactacaacagcactggcaacatgggagtgctggcaggacaggcctcccaactaaatgccgtggtagacttgcaagacagaaacacagagttgtcataccagctgatgcttgattccattggagacagatcaagatattttgccatgtggaaccaggcggttgatagttacgatccagatgttagaattattgaaaaccatggcacagaggatgaacttccaaactactgttttcctttgggaggaatatttaatactcagagttttaaaaaggtaaaacctggaacggataacggatgggaaacagatgatgacttttcagataaaaatgaaataagagttggcaacaactttgccatggagatcaatatccaggcaaacctgtggagaagcttcttgtattccaatgtggctctctacctgccagataagatgaagtactctccaaccaacatagacatttccaccaacactaacacctatgactacatgaacaaaagagtggcgcctccaggcctggtggactgctatgtcaatctgggggccaggtggtcccttgatgtaatggataacatgaacccctttaaccaccaccgcaatgcgggcctgcgataccgttccatgcttctgggtaacggccgctacgtgcccttccacatccaggtgccccaaaagttctttgccatcaaaagccttctactcttgcctggctcgtacacctacgaatggaatttcagaaaggatgtgaacatggtcctacagagctctctgggcaacgaccttagggtggatggggccagcatcaagtttgacagcatcaccctttatgctacctttttccccatggcccacaacaccgcttccacgcttgaggccatgctcagaaacgacaccaacgaccagtccttcaatgactacctctctggggccaacatgctctaccccatccccgccaacgctaccaacgtgcccatctccattccctctcgcaactgggccgccttcagaggctgggcatttacccgccttaagaccaaggagaccccctccctgggctcgggttttgacccctactttgtctactcgggatccatcccctacctggatggcaccttctacctcaaccacacttttaagaagatatccatcatgtatgactcctctgtcagctggccgggcaacgaccgcctgctcacccccaatgagttcgaggtcaagcgcgccgtggacggcgagggctacaacgtggcccagtgcaacatgaccaaggactggttcctggtgcagatgctggccaactacaacataggctaccagggcttctacatcccagagagctacaaggacaggatgtactccttcttcagaaatttccaacccatgagcaggcaggtggtggacgagaccaaatacaaggactatcaggccgttggcatcactcaccagcacaacaactcgggattcgtgggctacctggcacccaccatgcgcgagggacaggcctaccccgccaacttcccctaccccttgataggcaagaccgcggtcgacagcgtcacccagaaaaagttcctctgcgaccgcaccctctggcgcatccccttttctagcaacttcatgtccatgggcgcgctcacggacctgggccagaacctgctctatgccaactccgcccatgcgctggacatgacttttgaggtggaccccatggacgagcccacccttctctatattgtgtttgaagtgttcgacgtggtcagagtgcaccagccgcaccgcggtgtcatcgagaccgtgtacctgcgcacgcccttctcggccggcaacgccaccacctaaggagacagcgccgccgcctgcatgacgggttccaccgagcaagagctcagggccatcgccagagacctgggatgcggaccctattttttgggcacctatgacaaacgcttcccgggcttcatctcccgagacaagctcgcctgcgccatcgtcaacacggccgcgcgcgagaccgggggcgtgcactggctggcctttggctgggacccgcgctccaaaacttgctacctctttgacccttttggcttctccgatcagcgcctcaagcagatctatgagtttgagtacgaggggctgctgcgccgcagcgcgcttgcctcctcgcccgaccgctgcatcacccttgagaagtccaccgagaccgtgcaggggccccactcggccgcctgcggtctcttctgctgcatgtttttgcacgcctttgtgcgctggccccagagtcccatggatcgcaaccccaccatgaacttgctcaagggagtgcccaacgccatgctccagagcccccaggtccagcccaccctgcgccacaaccaggaacagctctaccgcttcctggagcgccactccccctacttccgcagtcacagcgcgcgcatccggggggccacctctttctgccacttgcaagaaaacatgcaagacggaaaatgatgtacagctcgctttttaataaatgtaaagactgtgcactttatttatacacgggctctttctggttatttattcaacaccgccgtcgccatctagaaatcgaaagggttctgccgcgcgtcgccgtgcgccacgggcagagacacgttgcgatactggaagcggctcgcccacttgaactcgggcaccaccatgcggggcagtggttcctcggggaagttctcgccccacagggtgcgggtcagctgcagcgcgctcaggaggtcgggagccgagatcttgaagtcgcagttggggccggaaccctgcgcgcgcgagttgcggtacacggggttgcagcactggaacaccagcagggccggattatgcacgctggccagcaggctctcgtcgctgatcatgtcgctgtccagatcctccgcgttgctcagggcgaatggggtcatcttgcagacctgcctgcccaggaaaggcggcagcccgggcttgccgttgcagtcgcagcgcaggggcatcagcaggtgcccgcggcccgactgcgcctgcgggtacagcgcgcgcatgaaggcttcgatctgcctgaaagccacctgcgccttggctccctccgaaaagaacatcccacaggacttgctggagaactggttcgcgggacagctggcatcgtgcaggcagcagcgcgcgtcggtgttggcgatctgcaccacgttgcgaccccaccggttcttcactatcttggccttggaagcctgctccttcagcgcgcgctggccgttctcgctggtcacatccatctctatcacctgctccttgttgatcatgtttgtcccgtgcagacacttcaggtcgccctccgtctgggtgcagcggtgctcccacagcgcgcaaccggtgggctcccaattcttgtgggtcacccccgcgtaggcctgcaggtaggcctgcaagaagcgccccatcatggccacgaaggtcttctggctcgtaaaggtcagctgcaggccgcgatgctcttcgttcagccaggtcttgcagatggcggccagcgcctcggtctgctcgggcagcatcctaaaatttgtcttcaggtcgttatccacgtggtacttgtccatcatggcgcgcgccgcctccatgcccttctcccaggcggacaccatgggcaggcttagggggtttatcacttccaccggcgaggacaccgtactttcgatttcttcttcctccccctcttcccggcgcgcgcccacgctgctgcgcgctctcaccgcctgcaccaaggggtcgtcttcaggcaagcgccgcaccgagcgcttgccgcccttgacctgcttaatcagcaccggcgggttgctgaagcccaccatggtcagcgccgcctgctcttcttcgtcttcgctgtctaccactatctctggggaagggcttctccgctctgcggcggtgcgcttcttttttttcttgggagcagccgtgacggagtccgccacggcgacggaggtcgagggcgtggggctgggggtgcgcggtaccagggcctcgtcgccctcggactcttcctctgactccaggcggcggcggagtcgcttctttgggggcgcgcgcgtcagcggcggcggagacggggacggggacggggacgggacgccctccacagggggtggtcttcgcgcagacccgcggccgcgctcgggggtcctctcgagctggtcttggtctcgactggccattgtatcctcctcctcctaggcagagagacataaggagtctatcatgcaagtcgagaaggaggagagcttaaccaccccctctgacaccgccgatgcgcccgccgtcgccgtcgcccccgctgccgccgacgcgcccgccacaccgagcgacacccccgcggacccccccgccgacgcacccctgttcgaggaagcggccgtggagcaggacccgggctttgtctcggcagaggaggatttgcgagaggaggagaataaggagaagaagccctcagtgccaaaagatgataaagagcaagacgagcacgacgcagatgcacaccagggtgaagtcgggcggggggacggagggcatggcggcgccgactacctagacgaagggaacgacgtgctcttgaagcacctgcatcgtcagtgcgccatcgtttgcgacgctctgcaggagcgcagcgaagtgcccctcagcgtggcggaggtcagccacgcctacgagctcagcctcttctccccccgggtgcccccccgccgccgcgaaaacggcacatgcgagcccaacccgcgcctcaacttctaccccgccttcgtggtgcccgaggtcctggccacctatcacatcttctttcaaaattgcaagatccccctctcgtgccgcgccaaccgtagccgcgccgataagatgctggccctgcgccagggcgaccacatacctgatatcgccgctttggaagatgtgccaaagatctttgagggtctgggtcgcaacgagaagcgggcagcaaactctctgcaacaggaaaacagcgaaaatgagagtcacaccggggtactggtggagctcgagggcgacaacgcccgcctggcggtggtcaagcgcagcatcgaggtcacccactttgcctaccccgcgctaaacctgccccccaaagtcatgaacgcggccatggacgggctgatcatgcgccgcggccggcccctcgctccagatgcaaacttgcatgaggagaccgaggacggccagcccgtggtcagcgacgagcagctggcgcgctggctggagaccgcggaccccgccgaactggaggagcggcgcaagatgatgatggccgcggtgctggtcaccgtagagctggagtgtctgcagcgcttcttcggcgaccccgagatgcagagaaaggtcgaggagaccctgcactacaccttccgccagggctacgtgcgccaggcttgcaagatctccaacgtggagctcagcaacctggtgtcctacctgggcatcttgcatgagaaccgcctcgggcagagcgtgctgcactccaccctgcgcggggaggcgcgccgcgactacgtgcgcgactgcgtttacctcttcctctgctacacctggcagacggccatgggggtctggcagcagtgtctggaggagcgcaacctcaaagagctggagaagctcctgcagcgcgcgctcaaagacctctggacgggctacaacgagcgctcggtggccgccgcgctggccgacctcatcttccccgagcgcctgctcaaaaccctccagcaggggctgcccgacttcaccagccaaagcatgttgcaaaacttcaggaactttatcctggagcgttctggcatcctacccgccacctgctgcgccctgcccagcgactttgtccccctcgtgtaccgcgagtgccccccgccgctgtggggtcactgctacctgttccaactggccaactacctgtcctaccacgcggacctcatggaggactccagcggcgaggggctcatggagtgccactgccgctgcaacctctgcacgccccaccgctccctggtctgcaacacccaactgctcagcgagagtcagattatcggtaccttcgagctacagggtccgtcctcctcagacgagaagtccgcggctccggggctaaaactcactccggggctgtggacttccgcctacctgcgcaaatttgtacctgaagactaccacgcccacgagatcaggttttacgaggaccaatcccgcccgcccaaggcggagctgaccgcctgcgtcatcacccagggcgagatcctaggccaattgcaagccatccaaaaagcccgccaagattttttgctgaagaagggtcggggggtgtatctggacccccagtcgggtgaggagctcaacccggttcccccgctgccgccgccgcgggaccttgcttcccaggataagcatcgccatggctcccagaaagaagcagcagcggccgccactgccgccaccccacatgctggaggaagaggaggaatactgggacagtcaggcagaggaggtttcggacgaggaggagccggagacggagatggaagagtgggaggaggacagcttagacgaggaggcttccgaagccgaagaggcagacgcaacaccgtcaccctcggccgcagccccctcgcaggcgcccccgaagtccgctcccagcatcagcagcaacagcagcgctataacctccgctcctccaccgccgcgacccacggccgaccgcagacccaaccgtagatgggacaccaccggaaccggggccggtaagtcctccgggagaggcaagcaagcgcagcgccaaggctaccgctcgtggcgcgctcacaagaacgccatagtcgcttgcttgcaagactgcggggggaacatctccttcgcccgccgcttcctgctcttccaccacggtgtggccttcccccgtaacgtcctgcattactaccgtcatctctacagcccctactgcggcggcagtgagccagagacggtcggcggcggcggcgcccgtttcggcgcctaggaagacccagggcaagacttcagccaagaaactcgcggcggccgcggcgaacgcggtcgcgggggccctgcgcctgacggtgaacgaacccctgtcgacccgcgaactgaggaaccgaatcttccccactctctatgccatcttccagcagagcagagggcaggatcaggaactgaaagtaaaaaacaggtctctgcgctccctcacccgcagctgtctgtatcacaagagcgaagaccagcttcggcgcacgctggaggacgctgaggcactcttcagcaaatactgcgcgctcactcttaaggactagctccgcgcccttctcgaatttaggcgggaacgcctacgtcatcgcagcgccgccgtcatgagcaaggacattcccacgccatacatgtggagctatcagccgcagatgggactcgcggcgggcgcctcccaagactactccacccgcatgaactggctcagtgccggcccacacatgatctcacaggttaatgatatccgcacccatcgaaaccaaatattggtggagcaggcggcgattaccaccacgccccgcaataatcccaaccccagggagtggcccgcgtccctggtgtatcaggaaattcccggccccaccaccgtactacttccgcgtgattcccaggccgaagtccaaatgactaactcaggggcgcagctcgcgggcggctgtcgtcacagggtgcggccccctcgccagggtataactcacctggagatccgaggcagaggtattcagctcaacgacgagtcggtgagctcctcgctcggtctcagacctgacgggaccttccagatagccggagccggccgatcttccttcacgccccgccaggcgtacctgactctgcagagctcgtcctcggcgccgcgctcgggcggcatcgggactctccagttcgtgcaggagtttgtgccctcggtctacttcaaccccttctccggctctcccggtcgctacccggaccagttcatctcgaactttgacgccgcgagggactcggtggacggctacgactgaatgtcgggtggacccggtgcagagcaacttcgcctgaagcacctcgaccactgccgccgccctcagtgctttgcccgctgtcagaccggtgagttccagtacttttccctgcccgactcgcacccggacggcccggcgcacggggtgcgctttttcatcccgagtcaggtgcgctctaccctaatcagggagtttaccgcccgtcccctactggcggagttggaaaaggggccttctatcctaaccattgcctgcatctgctctaaccctggattgcaccaagatctttgctgtcatttgtgtgctgagtataataaaggctgagatcagaatctactcgggctcctgtcgccatcctgtcaacgccaccgtccaagcccggcccgatcagcccgaggtgaacctcacctgcggtctgcaccggcgcctgagaaaatacctagcttggtactacaacagcactccctttgtggtttacaacagctttgaccaggacggggtctcactgagggataacctctcgaacctgagctactccatcaggaagaacagcaccctcgagctacttcctccttacctgcccgggacttaccagtgtgtcaccggtccctgcacccacacccacctgttgatcgtaaacgactctcttccgagaacagacctcaataactcctcttcgcagttccccagaacaggaggtgagctcaggaaaccccgggtaaagaagggtggacaagagttaacacttgtggggtttctggtgtatgtgacgctggtggtggctcttttgattaaggcttttccttccatgtctgaactctccctcttcttttatgaacaactcgactagtgctaacgggaccctacccaacgaatcgggattgaatatcggtaaccaggttgcagtttcacttttgattaccttcatagtcctcttcctgctagtgctgtcgcttctgtgcctgcggatcgggggctgctgcatccacgtttatatctggtgctggctgtttagaaggttcggagaccatcgcaggtagaataaacatgctgctgcttaccctctttgtcctggcgctggccgccagctgccaagccttttccgaggctgattttatagaaccccagtgcaatatcacttataaatctgaatataacctctgcactatcctaattaaatgcgttactcaacacgatgaggtaactgttagatacaaagatcaatcaaaaagagacgcactttacagcagctggcaaccaggagatgaacaaaaatacaatgtgaccgtcttccagggcaaactctccaaaacttacaattacactttcccattcgaggagatgtgtgagtttgtcatgttcatgtcaaagcagtacaagatgtggcctccgactccccagggctgtgtggaaaatccaggctctttctgcatgatctctctctgtgtaactgtgctggcactaatactcacgcttttgtatatcagatttaaatcaaggcaaagcttcatcgatgaaaagaaaatgccttaatcgcttttcacgcttgattgctaacaccgggtttttatccgcagaatgattggaatcaccctactaatcacctccctccttgcgattgcccatgggttggaacgaatcgaagtccctgtgggggccaatgttaccctggtggggcctgtcggcaatgctacattaatgtgggaaaaatatactaaaaatcaatgggtctcttactgcactaacaaaaacagccacaagcccagagccatctgcgatgggcaaaatttaaccttgattgatgttcaattgctggatgcgggctactattatgggcagctgggtacaatcgttaattactggagaccccacaaagattacatgcttcacgtagtaaagggtccccttagcagcccgaccactaccaccacctctaccacacccactaccaccactactcccatcaccagcactgccacccagcctcctcatagcagaacaaccacttttatcaattccaagtcccactccccccacattgccggcgggccctccgcctcaaactccgagaccaccgagatctgcttctgcaaatgctctgacgccattgcccaggatttggaagaccacgaggaagatgagcatgacttcgcagatgcatgccaggcatcaggggcagaagcactgccggtggccctcaaacagtatgcagactcccataccacccccgatcttccaccgccttcccagaagccaagtttcctgggggaaaatgaaacactgcctctctccatacttgctttgacatctgttgctattctgactgctctgctggtgctcctatgctctatatgctacctgatctgctgcaggaagaaaaaatctcacggccatgctcaccagccgcttatgcacttcccttaccctccagagttgggcgaccacaaactttaagtctgcagtagctatctgcccatcccttgtcagtcgacagcgatgagccccactaatctaacggcctctggacttacaacattgtctcttaatgagaccaccgctcctcaagacctgtacgatggtgtctccgcgctggttaaccagtgggatcacctgggcatatggtggctcctcataggagcagtgaccctgtgcctaatcctggtctggataatctgctgcatcaaaagcagaagacccaggcggcggcccatctacaggcccttcgtcatcacacctgaagatgatgatggcaccacgtccaggctgcagagcctaaagcagctactcttctcttttacagcatggtaaattgaacatgcctcgcattttcatctacttgtttcttcttccactctttttgggctcttctacattggcagctgtgtcccacatcgaggtagactgcatctcgcccttctcagtctacttactcttcggctttgtcatttgcaactttgtctgcagcgttatcactgtagtgatctgcttcatacagtgcatcgactacgtctgcgtacgggtggcctattttagacaccacccccagtatcgcaacagggacatagcggctctcctaagacttgtttaaatcatgcccaaattaactgtgattgctcttctgattatctgctgcgtcctagccgcgattgggactcagcctactaccaccaccaccagcgctcccagaaagagacatgtttcctgcagcttcaaacgtccctggaatataccccaatgctttactgatgaacctgaaatctctttggcttggtacttcagcgtcaccgcccttctcatcttctgcagtacggttattgcccttgccatttacccttcccttgacctgggctggaatgctgtcaactctatggaatatcccaccttcccagaaccagacctgccagacctggttgttctaaacgcgtttcctcctcctcccgttcaaaatcagtttcgccctccgtccccgacgcccactgaggtcagctactttaatctaacaggcggagatgactgaaaacctagacctagaaatggacggcctctgcagcgaacaacgcatactagagaggcgccggcaaaaagcagagctcgagcgtcttaaacaagagctccaagacgcggtggccatacaccagtgcaaaaaaggtgtcttctgtctagtgaaacaggccacgctcacctatgaaaaaacaggtgacacccaccgcctaggatacaagctgcccacacaacgccagaagttcgcccttatgataggcgaacaacccatcaccgtcacccagcactctgtggagacagaaggctgcatacacgctccctgcaggggcgctgactgtctctacaccttgatcaaaaccctctgcggccttagagacctcatccctttcaattgatcataactgtaatcaataaaaaatcacttacttgaaatctgatagcaagcctctgtccaattttttcagcaacacttccttcccctcctcccaactctggtactctaggcgcctcctagctgcaaacttcctccacagtctgaagggaatgtcagattcctcctcctgtccctccgcacccacgatcttcatgttgttgcagatgaaacgcgcgagatcgtctgacgagaccttcaaccccgtgtacccctacgataccgagatcgctccgacttctgtcccttttcccacccctccctttgtgtcccccgcaggaatgcaagaaaacccccctggagtgctatccctacgccttgcagaacccttgaccacctccaatggagcgctgaccctaaaaatggggggtggtttgaccctggacgaagaaggaaagcttacttcccaaaatattaccagtgttgatcctcctcttaaaaaaacaaaaaacaatatcagtctgcagactgcctccccccttgccgtcagctcgggagccctcacacttttcgctactcctcccctggcagttaatgacaataacctaactgtgcagtctcaggctccccttacactggaaaactcaaaactaagtctggccaccaaaggccccctaaccgtttctgaaggaaaacttgccctagaaacagaggctcccttgcatgcaagcgacagcagtagcctaggccttagtgtaacggccccactgagcattagcagcgacagcctaggactagacttgcaagcgcccattatttctgaaaatggaaaactgggcctaagagtaacaggtcccctaactgtggccagcagtattgatgctttgacagtagccacaggcagcggtattggacttgatagcaacacgcgcctacaggcaaaattggtcgcgcccctaggctttgacaccaatggcaacattaagctcagcacttcgggcggcatgagactgaacaatggcacacttatactagatgtaaactacccatttgaggctcaaggtcaacttagtctaagagtgggttcgggtccactgtatgtagactccaacacacataacctaaccgctagatgccttagagggctatacataacgtcatctaataaccaaaccggcctggaggccaacataaaacttacaaaaggacttgtgtttgatggaaatgccatagcagttaatgttagcaaagggctagaatacagtaccactgaaacagcgcagggtgtaaatcccatacagactaaaataggtttgggcatggaatatgataccaatggagccataaagccaagactaggctctggtttgagctttgataattcaggagctattgtagtgggaaacaaaaatgatgacactcttactctgtggactacaccagacccatctcccaactgtcagattaactcggaaaaagatgctaaactaaccttggtactaaccaagtgcggtagtcaaattgtaggcacagtatctgcctttgctcttaaaggcagccttgccccaattaatggcacagtgagctcagttagtatattcctaagatttaatgaaaatggggtactgatgagcaactcatcgttggaaagccaatactggaattacaggaatggaaattcaactaatgccacaccatatacaaatgcactaggttttatgcctaacctggcagcttatcccaaaggccaggcaacgactgcaaaaagcagcatcattagccaggtttacatgaatggtgacacttccaaacctatgatatttacaataacttttaatgggcttgaaacagaggaaactcaggtcagtacatattccatgacattttcatggaggtggacaaatggagactacgtggggcactattttaaaacaaactcctttactttctcctacattgcccaagaataaagaaagcacagagatgcttgtttttgatttcaaaattgtgtgcttttatttatttcaagcttacagtatttccagtagtcattcgaatagagcttaattaaactgcatgagaacccttccacatagcttaaattagcaccagtgcaaatggagaaaaatcaacatacctttttatccagatatcagagaactctagtggtcagttttcccccaccctcccagctcacagaatacacagtcctttccccccggctggctttaaacaacactatctcattggtaacagacatattcttaggtgtaataatccacacggtctcttggcgggccaaacgctggtcggtgatgttaataaactccccaggcagctctttcaagttcacgtcgctgtccaactgctgaagcgctcgcggctccgactgcgcctctagcggaggcaacggcaacacccgatccttgatctataaaggagtagagtcataatcccccataagaatagggcggtgatgcagcaacaaggcgcgcagcaactcctgccgccgcctctccgtacggcaggaatgcaacggcgtggtggtctcctccgcgataatccgcaccgctcgcagcatcagcatcctcgtcctccgggcacagcagcgcatcctgatctcactgagatcggcgcagtaagtgcagcacaaaaccaagatgttatttaagatcccacagtgcaaagcgctgtacccaaagctcatggcgggaaggacagcccccacgtgaccatcataccagatcctcaggtaaatcaaatgacgacctctcataaacacgctggacatgtacatcacctccttgggcatgtgctgattcaccacctctcgataccacaagcatcgctgattaattaaagacccctcgagcaccatcctgaaccaggaagccagcacctgaccccccgccaggcactgcagggaccccggtgaatcgcagtggcagtgaagactccagcgctcgtagccgtgaaccatagagctggtcattatatccaaattggcacaacacagacacactttcatacactttttcatgattagcagctcctctctagtcaggaccatatcccaaggaatcacccactcttgaatcaaggtaaatcccacacagcagggcaggcctctcacataactcacgttatgcatagtgagcgtgtcgcaatctggaaataccggatgatcttccatcaccgaagcccgggtctccgtctcaaagggaggtaaacggtccctcgtgtagggacagtggcgggataatcgagatcgtgttgaacgtagagtcatgccaaagggaacagcggacgtactcatatttcctccagcagaaccaagtgcgcgcgtggcagctatccctgcgtcttctgtctcgccgcctgccccgttcggtgtagtagttgtaatacagccactccctgagaccgtcaaggcgctccctggcgtccggatctatgacaacaccgtcctgcagcgccgccctgatgacatccaccaccgtagagtatgccaagcccagccaggaaatgcattcactttgacagcgagagataggaggagcggggagagatggaagaaccatgatagtaaagagaacttttattccaatcgatcttctaagatatcaaagtggagatctataagatgacactggtctcctccgctgagtcgatcaaaaataacagctaaaccacaaacaacacgattggtcaaatgctccacaagggcctgcagcataaaattgcctcggaactccaccgcaagcataacatcaaagccaccgcctctatcgtgatcaagaataaaaaccccacagctatccaccagacccatatagttttcatctctccatcgtgaaaaaagatttacaagctcctcctttaaatcacctccaaccaattgaaaaagttgaaccagaccgccctccaccttcattttcagcaagcgtatcatgattgcaaaaattcaggctcctcagacacctgtataagattgagaagcggaacgttaacatcgatgtttcgctcgcgtaaatcacgcctcagtgcaagcataatataatcccacaggtcggagcggatcagcgaggacacctccccgccaggaaccaactcaacggagcctatgctgattataatacgcatattcggagctatgctaaccagcacggcccccaaataggcgtactgcataggcggcgacaaaaagtgaacagtttgggttaaaaaatcaggcaaacactcgcgcaaaaaagcaagaacatcataaccatgctcatgcaaatagatgcaagtaagctcaggaacgaccacagaaaaatgcacaatttttctctcaaacatgactgcgagccctgcaaaaaataaaaaagaaacattacacaagagtagcctgtcttacgatgggatagactactctaaccaacataagacgggccacaacatcgcccgcgtggccataaaaaaaattgtccgtgtgattaaaaagaagcacagatagctggccagtcatatccggagtcatcacgtgtgaacccgtgtagacccccgggttggacacatcggccaaagaaagaaagcggccaatgtacccaggaggaattataacactaagacgaagatacaacagaataaccccatgagggggaataacaaagttagtaggtgaataaaaacgataaacacccgaaactccctcctgcgtaggcaaaatagcaccctccccttccaaaacaacatatagcgcttccacagcagccatgacaaaagactcaaaacactcaaaagactcagtcttaccaggaaaataaaagcactctcacagcaccagcactaatcagagtgtgaaaagggccaagtgccgaacgagtatatataggaataaaaaatgacgtaaatgtgtaaaggtcagaaaacgcccagaaaaatacacagaccaacgcccgaaacgaaaacccgcgaaaaaatacccagaacttcctcaacaaccgccacttccgctttctcacgatacgtcacttccgcaagaaaagcaaaactacatttcccacatgtgtaaaaacgaaaccccgccccttctaaccgcccacaacttacatcatcaaaacgtaaagtcctacgtcacccgccccgcctctccccgcccacctcattatcatattggccacaatccaaaataaggtatattat

SEQ ID NO: 57 - DNA, 37057 bp, Gorilla beringei graueri
ataatataccttattttggattgtggccaatatgataatgaggtgggcggggagaggcggggcgggtgacgtaggacgcgcgagtagggttgggaggtgtggcggaagtgtggcatttgcaagtgggaggagctcacatgcaagcttccgtcgcggaaaatgtgacgtttttgatgagcgccgcctacctccggaagtgccaattttcgcgcgcttttcaccggatatcgtagtaattttgggcgggaccatgtaagatttggccattttcgcgcgaaaagtgaaacggggaagtgaaaactgaataatagggcgttagtcatagcgcgtaatatttaccgagggccgagggactttgaccgattacgtggaggactcgcccaggtgttttttacgtgaatttccgcgttccgggtcaaagtctccgtttttattgtcaccgtcatttgacgcggagggtatttaaacccgctgcgctcctcaagaggccactcttgagtgccagcgagaagagttttctcctctgctccgcttcggtgatcgaaaaatgagacacatagcctgcactccgggtcttttgtccggtcgggcggcggccgagcttttggacgctttgatcaatgatgtcctgagcgatgattttccgtctactacccactttagcccacctactcttcacgaactgtacgatctggatgtactggtggatgtgaacgatcccaacgaggaggcggtttctgcgttttttcccgagtctgcgctgttggccgctcaggagggatttgacctacacactccgccgcctattttagagtctccgctgccggagcccagtggtataccttatatgcctgaactgcttcccgaagtggtagacctgacctgccacgagcctggctttccgcccagcgacgatgatggtgagccttttgttttagactttgctgagatacctgggcacggttgcaggtcttgtgcatatcatcagagggttaccggagaccccgaggttaagtgttcgctgtgctatatgaggatgacctcttcctttatctacagtaagtttttgtctaggtgggcttttgggtaggtgggttttgtgtcagaacaggtgtaaacgttgcttgtgttttttgtacctgtaggtccggtgtccgagccagacccggagcccgaccgcgatcccgagccggatcccgagcctcctcgcaggacaaggaaactaccttccattctgtgcaagtctcagacacctgtaaggaccagcgaggcagacagcaccgactctggcacttctacctctccccctgaaattcacccagtggttcctctgggtatacataaacctgttgctgttagagtttgcgggcgacgccctgcagtacagtgcattgaggacttgcttcacgatcccgaggaacctttggacttgagccttaaacgccctaggcaataaaccccacctaagtaataaaccccacctaagtaataaaccctgccgcccttggttattgagatgacgcccaatgtttgcttttgaatgacttcatgtgtgtaataaaagtgagtgtgatcataggtctcttgtttgtctgggcggggcttaagggtatataagtttctcggggctaaacttggttacacttgaccccaatggaggcgtgggggtgcttggaggagtttgcggacgtgcgccgtttgctggacgagagctctaaccatacctatactatttggaggtatctgtggggctctactcaggccaagttggtctccagaattaagcaggattacaagtgcgattttgaagagctttttagttcctgcggtgagcttttgcaatccttgaatctgggccatcaggctattttccaggaaaaggttctctcgactttggatttttccactcccgggcgcaccgccgcttgtgtggcttttgtgtcttttgtgcaagataaatggagcgaggagacccacctgagtcacggctacgtactggatttcatggcgatggctctttggagggctcacaacaaatggaagattcagaaggaactgtacggttccgccctacgtcgtccacttttgtcgcgacaggggctgaggtttcccgaccatcggcagcatcagaatctggaagacgagtcggaggagcgagcggaggagaagatcagcttgagagccggcctggaccctcctcaggaggaatgaatctcccgcaggtggttgacctgtttccagaactgagacgggtcctgactatcagggaggatggtcagtttgtgaagaagtttaagagggatcggggtgagggagatgatgaggcggctagcaatttagcttttagtctgatgactcgccaccgaccggaatgtattacctatcagcagattaaggagagttgtgccaacgagctggatcttttgggtcagaagtatagcatagaacagcttaccacttactggcttcagcctggggatgattgggaagaggcgatcagggtgtatgcaaaggtggccctgcggcccgattgcaagtataagattactaagttggttaatattagaaactgctgctatatttctgggaacggggccgaagtggagatagatactcaggacagggtggcttttaggtgttgcatgataaacatgtggcccgggatactggggatggatggggtggtgttcatgaatgtgaggtttacgggccccaactttaatggcacggtgttcatgggcaacaccaacttgctcctgcatggtgcgagtttctatgggtttaataacacctgtatagaggcctggaccgatgtaaaggttcgaggttgttccttttatagctgttggaaggcggtggtgtgtcgccctaaaagcaggggttctgtgaaaaaatgcttgtttgaaaggtgcaccttaggcatcctctctgagggcaactccagggtgcgccataatgtggcttcgaactgcggttgcttcatgcaagtgaagggggtgagcgttatcaagcataactcggtgtgtggaaactgcgaggatcgcgcctcccagatgctgacctgctttgatggtaactgtcacctgttgaagaccattcatataagcagccaccccagaaaggcctggcccgtgtttgagcataacatcctgacccgctgctccttgcatctgggggtcaggaggggtatgttcctgccttaccagtgtaactttagccacactaaaatcctgctggaacccgagtgtatgaccaaggtcagcctaaatggcgtgtttgatgcgactctgagaatctggaaggtgctgaggtatgatgagaccaggaccaggtgccgaccctgcgagtgcggcggcaagcacatgagaaatcagcctgtgatgttggatgtgaccgaggagcttaggcctgaccatctggtgctggcctgcaccagggccgagtttgggtctagcgatgaggataccgattgaggtgggtaaggtgggcgtggctagaagggtggggcgtgtataaattgggggtctaagggtctctctgttttgtcttgcaacagccgccgccatgagcgacaccggcaacagctttgatggaagcatctttagcccctatctgacagtgcgcatgcctcactgggctggagtgcgtcagaatgtgatgggttccaacgtggatggacgccccgttctgccttcaaattcgtctacaatggcctacgcgaccgtgggaggaactccgctggacgccgcgacctccgccgccgcctccgccgccgccgcgaccgcgcgcagcatggctacggacctttacagctctttggtggcgagcggcgcggcctctcgcgcgtctgctcgggatgagaaactgaccgctctgctgcttaaactggaagacttgacccgggagctggctcaactgacccagcaggtctccagcttgcgtgagagcagccttgcctccccctaatggcccataatataaataaaagccagtctgtttggattaagcaagtgtatgttctttatttaactctccgcgcgcggtaagcccgggaccagcggtctcggtcgtttagggtgcggtggattctttccaacacgtggtacaggtggctctggatgtttagatacatgggcatgagtccatccctggggtggaggtagcaccactgcagagcttcgtgctcgggggtggtgttgtatatgatccagtcgtagcaggagcgctgggcgtggtgctgaaaaatgtccttaagcaagaggcttatagctagggggaggcccttggtgtaagtgtttacaaatctgctcagttgggaggggtgcatccggggggatataatgtgcatcttggactggatttttaggttggctatgttcccacccagatcccttctgggattcatgttgtgcaggaccaccagcacggtatatccagtgcacttgggaaatttatcgtggagcttagacgggaatgcatggaagaacttggagacgcccttgtggcctcccagattttccatacattcgtccatgatgatggcaatgggcccgtgggaagctgcctgagcaaaaatgtttctgggatcgctcacatcgtagttatgttccagggtgaggtcatcataagacatctttacaaatcgggggcggagggtcccggactggggtatgatggtaccctcgggccccggggcgtagttcccctcacagatctgcatctcccaggctttcatttcagagggagggatcatatccacctgcggagcgatgaaaaacacagtttctggcgcaggggagattaactgggatgagagcaggtttctgagcagctgtgactttccacagccggtgggcccatatatcacgcctatcaccggctgcagctggtagttaagagagctgcagctgccgtcctcccggagcaggggggccacctcgttcagcatatccctgacgtggatgttctccctgaccaattccgccagaaggcgctcgccgcccagcgaaagcagctcttgcaaggaagcaaaatttttcagcggttttaggccgtcggccgtgggcatgtttttcagcgtctgggtcagcagttccagcctgtcccacagctcggtgatgtgctctacggcatctcgatccagcagatctcctcgtttcgcgggttggggcggctttcgctgtagggcaccagccgatgggcgtccagcggggccagagtcatgtccttccatgggcgcagggtcctcgtcagggtggtctgggtcacggtgaaggggtgcgctccgggttgggcgctggccagggtgcgcttgaggctggttctgctggtgctgaatcgctgccgctcttcgccctgcgcgtcggccaggtagcatttgaccatggtctcgtagtcgagaccctcggcggcgtgccccttggcgcggagctttcccttggaggtggcgccgcacgaggggcactgcaggctcttcagggcgtagagcttgggagcgagaaacacggactctggggagtaggcgtccgcgccgcaggaagcgcagaccgtctcgcattccaccagccaagtgagctccgggcggtcagggtcaaaaaccaggttgcccccatgctttttgatgcgtttcttacctcggctctccatgaggcggtgtcccttctcggtgacgaagaggctgtccgtgtccccgtagaccgacttcaggggcctgtcttccagcggagtgcctctgtcctcctcgtagagaaactctgaccactctgagacgaaggcccgcgtccaggccaggacgaaggaggccacgtgggaggggtagcggtcgttgtccactagcgggtccaccttctccagggtgtgcaggcacatgtccccctcctccgcgtccagaaaagtgattggcttgtaggtgtaggacacgtgaccgggggttcccgacgggggggtataaaagggggtgggcgccctttcatcttcactctcttccgcatcgctgtctgcgagagccagctgctggggtaagtattccctctcgaaggcgggcatgacctcagcgctcaggttgtcagtttctaaaaatgaggaggatttgatgttcacctgtcctgaggtgatacctttgagggtacctgggtccatctggtcagaaaacactatttttttgttgtcaagcttggtggcgaacgacccgtagagggcgttggagagcagcttggcgatggagcgcagggtctggtttttgtcgcggtcggctcgctccttggccgcgatgttgagttgcacgtactcgcgggccacgcacttccactcggggaagacggtggtgcgctcgtctgggatcaggcgcaccctccagcctcggttgtgcagggtgaccatgtcgacgctggtggcgacctcgccgcgcaggcgctcgttggtccagcagaggcggccgcccttgcgcgagcagaaggggggtagggggtccagctggtcctcgtttggggggtccgcgtcgatggtgaagaccccggggagcaagcgcgggtcaaagtagtcgatcttgcaagcttgcatgtccagagcccgctgccattcgcgggcggcgagcgcgcgctcgtaggggttgaggggcgggccccagggcatggggtgggtgagcgcggaggcgtacatgccgcagatgtcatacacgtacaggggttccctgaggatgccgaggtaggtggggtagcagcgccccccgcggatgctggcgcgcacgtagtcatagagctcgtgggagggggccagcatgttgggcccgaggttggtgcgctgggggcgctcggcgcggaaggcgatctgcctgaagatggcatgggagttggaggagatggtgggccgctggaagacgttgaagcttgcttcttgcaagcccaccgagtccctgacgaaggaggcgtaggactcgcgcagcttgtgcaccagctcggcggtgacctggacgtcgagcgcgcagtagtcgagggtctcgcggatgatgtcatacttatcctcccccttctttttccacagctcgcggttgaggacgaactcttcgcggtctttccagtactcttggaggggaaacccgtccgtgtccgaacggtaagagcctagcatgtagaactggttgacggcctggtaggggcaacagcccttctccacgggcagcgcgtaggcctgcgccgccttgcggagggaggtgtgggtgagggcgaaagtgtccctgaccatgactttgaggtattgatgtttgaagtctgtgtcatcgcagccgccctgttcccacagggtgtagtccgtgcgctttttggagcgcgggttgggcagggagaaggtgaggtcattgaagaggatcttccccgctcgaggcatgaagtttctggtgatgcgaaagggccctgggaccgaggagcggttgttgatgacctgggcggccaggacgatctcgtcaaagccgtttatgttgtggcccacgatgtagagctccaaaaagcggggctggcccttgatggaggggagctttttgagttcctcgtaggtgagctcctcgggcgattccaggccgtgctcctccagggcccagtcttgcaagtgagggttggccgccaggaaggatcgccagaggtcgcgggccatgagggtctgcaggcggtcgcggaaggttctgaactgtcgccccacggccatcttttcgggggtgatgcagtagaaggtgagggggtctttctcccaggggtcccatctgagctctcgggcgaggtcgcgcgcggcggcgaccagagcctcgtcgccccccagtttcatgaccagcatgaagggcacgagctgcttgccaaaggctcccatccaagtgtaggtctctacatcgtaggtgacaaagaggcgctccgtgcgaggatgagagccgatcgggaagaactggatctcccgccaccagttggaggattggctgttgatgtggtgaaagtagaagtcccgtctgcgggccgagcactcgtgctggcttttgtaaaagcgaccgcagtactggcagcgctgcacgggttgtatatcttgcacgaggtgaacctggcgacctctgacgaggaagcgcagcgggaatctaagtcccccgcctggggtcccgtgtggctggtggtcttctactttggttgtctggccgccagcatctgtctcctggagggcgatggtggagcagaccaccacgccgcgagagccgcaggtccagatctcggcgctcggcgggcggagtttgatgacgacatcgcgcacattggagctgtccatggtctccagctcccgcggcggcaggtcagctgggagttcctggaggttcacctcgcagagacgggtcaaggcgcgggcagtgttgagatggtatctgatttcaaggggcgtgttggcggcggagtcgatggcttgcaggaggccgcagccccggggggccacgatggttccccgcggggcgcgaggggaggcggaagctgggggtgtgttcagaagcggtgacgcgggcgggcccccggaggtagggggggttccggccccacgggcatgggcggcaggggcacgtcttcgccgcgcgcgggcaggggctggtgctggctccgaagagcgcttgcgtgcgcgacgacgcgacggttggtgtcctgtatctggcgcctctgagtgaagaccacgggtcccgtgaccttgaacctgaaagagagttcgacagaatcaatctcggcatcgttgacagcggcctggcgcaggatctcctgcacgtcgcccgagttgtcctggtaggcgatctctgccatgaactgctcgatctcttcctcctggagatctcctcgtccggcgcgctccacggtggccgccaggtcgttggagatgcgacccatgagctgcgagaaggcgttgagcccgccctcgttccagacccggctgtagaccacgcccccctcggcgtcgcgggcgcgcatgaccacctgggccaggttgagctccacgtgtcgcgtgaagacggcgtagttgcgcaggcgctggaaaaggtagttcagggtggtggcggtgtgctcggcgacgaagaagtacatgacccagcgccgcaacgtggattcattgatgtcccccaaggcctccaggcgctccatggcctcgtagaagtccacggcgaagttgaaaaactgggagttgcgagcggacacggtcaactcctcctccagaagacggatgagctcggcgacagtgtcgcgcacctcgcgctcgaaggccacggggggcgcttcttcctcttccacctcttcttccatgatcgcttcttcttcttcctcagccgggacgggagggggcggcggcggcgggggaggggcgcggcggcggcggcggcgcaccgggaggcggtcgatgaagcgctcgatcatctccccccgcatgcggcgcatggtctcggtgacggcgcggccgttctcccgggggcgcagctcgaagacgccgcctctcatctcgccgcggggcgggcggccgtgaggtagcgagacggcgctgactatgcatcttaacaattgctgtgtaggtacgccgccgagggacctgattgagtccagatccaccggatccgaaaacctttggaggaaagcgtctatccagtcgcagtcgcaaggtaggctgagcaccgtggcgggcgggggcgggtctggagagttcctggcggagatgctgctgatgatgtaattaaagtaggcggtcttgagaaggcggatggtggacaggagcaccatgtctttgggtccggcctgttggatgcggaggcggtcggccatgccccaggcctcgttctgacaccggcgcaggtctttgtagtagtcttgcatgagtctttccaccggcacctcttctccttcctcttctccatctcgccggtggtttctcgcgccgcccatgcgcgtgaccccaaagcccctgagcggctgcagcagggccaggtcggcgaccacgcgctcggccaagatggcctgctgcacctgagtgagggtcctctcgaagtcatccatgtccacgaagcggtggtaggcgcccgtgttgatggtgtaggtgcagttggccatgacggaccagttgacggtctggtgtcccggctgcgagagctccgtgtaccgcaggcgcgagaaggcgcgggaatcgaacacgtagtcgttgcaagtccgcaccagatactggtagcccaccaggaagtgcggcggaggttggcgatagaggggccagcgctgggtggcgggggcgccgggcgccaggtcttccagcataaggcggtggtatccgtagatgtacctggacatccaggtgatgccggcggcggtggtggtggcgcgcgcgtagtcgcggacccggttccagatgtttcgcaggggcaagaagtgttccatggtcggcacgctctggccggtgaggcgcgcgcagtcgttgacgctctatacacacacaaaaacgaaagcgtttacagggctttcgttctgtagcctggaggaaagtaaatgggttgggttgcggtgtgccccggttcgagaccaagctgagctcggccggctgaagccgcagctaacgtggtattggcagtcccgtctcgacccaggccctgtatcctccaggatacggtcgagagcccttttgctttcttggccaagcgcccgtggcgcgatctgggatagatggtcgcgatgagaggacaaaagcggctcgcttccgtagtctggagaaacaatcgccagggttgcgttgcggcgtaccccggttcgagcccctatggcggcttggatcggccggaaccgcggctaacgagggccgtggcagccccgtcctcaggaccccgccagccgacttctccagttacgggagcgagccccttttgtttttttattttttagatgcatcccgtgctgcggcagatgcgcccctcgccccggcccgatcagcagcagcaacagcaggcatgcagacccccctctcccctttccgccccggtcaccacggccgcggcggccgtgtcgggcgcggggggcgcgctggagtcagatgagccaccgcggcggcgacctaggcagtatctggacttggaagagggcgagggactggcgcggctgggggcgaactctccagagcgccacccgcgggtgcagttgaaaagggacgcgcgcgaggcgtacctgccgcggcagaacctgtttcgcgaccgcgggggcgaggagcccgaggagatgcgagactgcaggttccaagcggggcgcgagctgcggcgcgggctggacagacagcgcctgctgcgcgaggaggactttgagcccgacacgcagacgggcatcagccccgcgcgcgcgcacgtagccgcggccgacctggtgaccgcctacgagcagacggtgaaccaggagcgcaacttccaaaagagcttcaacaaccacgtgcgcacgctggtggcgcgcgaggaggtgaccctgggtctcatgcatctgtgggacctggtggaggcgatcgtgcagaaccccagcagcaagcccctgaccgcgcagctgttcctggtggtgcagcacagcagggacaacgaggccttcagggaggcgctgctgaacatcaccgagccggaggggcgctggctcctggacctgataaacatcctgcagagcatagtggtgcaggagcgcagcctgagcctggccgagaaggtggcggccatcaactactctatgctgagcctgggcaagttctacgcccgcaagatctacaagaccccctacgtgcccatagacaaggaggtgaagatagacagcttctacatgcgcatggcgctgaaggtgctgaccctgagcgacgacctgggagtgtaccgcaacgagcgcatccacaaggccgtgagcgccagccggcggcgcgagctgagcgaccgcgagctgatgcacagtctgcagcgcgcgctgaccggcgcgggcgagggcgacagggaggtcgagtcctacttcgacatgggggccgacctgcactggcagccgagccgccgcgccctggaggcggcgggggcgtacggcggccccctggcggacgatgaccaggaagaggaggactatgagctagaggagggcgagtacctggaggactgacctggctggtggtgttttggtatagatgcaagatccgaacgtggcggacccggcggtccgggcggcgctgcagagccagccgtccggcattaactcctctgacgactgggccgcggccatgagtcgcatcatggccctgaccgcgcgcaaccccgaggctttcaggcagcagcctcaggccaaccggctggcggccatcttggaagcggtagtgcccgcgcgctccaaccccacccacgagaaggtgctggccatagtcaacgcgctggcggagagcagggccatccgcgcggacgaggccggactggtgtacgatgcgctgctgcagcgggtggcgcggtacaacagcggcaacgtgcagaccaacctggaccgcctggtgacggatgtgcgcgaggccgtggcgcagcgcgagcgcttgcatcaggacggtaacctgggctcgctggtggcgctaaacgccttcctcagcacccagccggccaacgtaccgcgggggcaggaggactacaccaactttttgagcgcgctgcggctgatggtgaccgaggtccctcagagcgaggtgtaccagtcggggcccgactacttcttccagaccagcagacagggcttgcaaaccgtgaacctgagccaggctttgaagaacctgcgggggctgtggggagtgaaggcgcccaccggcgaccgggctacggtgtccagcctgctaacccccaactcgcgcctgctgctgctgctgatcgcgcccttcacggacagcgggagcgtctcgcgggaaacctatctgggccacctgctgacgctgtaccgcgaggccatcgggcaggcgcaggtggacgagcacaccttccaagagatcaccagcgtgagccacgcgctggggcaggaggacacgggcagcctgcaggcgaccctgaactacctgctgaccaacaggcggcagaagattcccacgctgcacagcctgacgcaggaggaggagcgcatcttgcgctacgtgcagcagagcgtgagcctgaacctgatgcgcgacggcgtgacgcccagcgtggcgctggacatgaccgcgcgcaacatggaaccgggcatgtacgcctcccaccggccgttcattaaccgcctgatggactacttgcatcgggcggcggccgtgaaccccgagtacttcactaatgccattctgaatccccactggatgccccctccgggtttctacaacggggacttcgaggtgcccgaggttaacgacgggttcctctgggatgacatggatgacagtgtgttctcacccaacccgctgcgcgccgcgtctctgcgattgaaggagggttctgacagggaaggaccgaggagtctggcctcctccctggctctgggagcggtgggcgcggcggcgcggggcagtagccccttccccagcctggcagactctctgaacagcgggcgggtgagcaggccccgcttgctaggcgaggaggagtatctgaacaactccctgctgcagcccgcgagggacaaaaacgctcagcggcagcagtttcccaacaatgggatagagagcctggtggacaagatgtccagatggaagacgtatgcgcaggagtacaaggagtgggaggaccgccagccgcggcccctgccgccccctaggcagcgctggcagcggcgcgcgtccaaccgccgctggaggcaggggcccgaggacgatgatgactctgcagatgacagcagcgtgctggacctgggcgggagcgggaaccccttttcgcacctgcgcccccgcctgggcaagatgttttaaaagagaaaaaataaaaactcaccaaggccatggcgacgagcgttggttttttgttcccttccttagtatgcgacgcgcggcgatgttcgaggaggggcctcccccctcttacgagagcgcgatgggattttctcctgcgacgcccctacagcctccctacgtgcctcctcggtacctgcaacctaccgggggaagaaatagcatctgttactctgagctgcagcccctgtatgacaccaccaaagtgtacctggtggacaacaagtctgcggacgtggcctccctgaactaccagaacgaccacagcgattttttgaccaccgtgatccaaaacaatgacttcaccccaaacgaggccagcacccagaccataaacctggacaacaggtcgcactggggcggtgatctgaagaccatcttgcacaccaacatgcccaacgtgaatgagtttatgtttactaactcttttaaggcgcgggtaatggtggcgcgcgacgataagggagtgcctaaatacgagtgggtggactttacactgcccgagggcaactactccgagatcatgactcttgacctgatgaacaacgcgatcgtggagcactacttgaaagtaggcaggcagaacggggtaaaagaaagcgatattggagttaagtttgacaccaggaactttcgcctgggatgggaccccgagacggggttggttatgcccggggtttacactaatgaagcttttcaccccgatatagtgctcttgcccggatgcggggtggacttcacccaaagccggctgagcaacctgctgggcattcgaaagcgccagccattccaggaggggtttcaaatcacttatgagcatttggaagggggcaacattccggcgcttctggatttggtcgcctacgaggagagtttgaaatccgaggaaagcggggataacactgacaagggcggcgaggagcaagccggcgatggcgacactgcttcggtagaaaacgaaagtgcgtccgtggtggaggcggcggcggtagcgaccgcagagccggagaccgtagaggaggatatgaatgatagcgcaatcagaggagactcgtttattccccggggcgaagaaaagaaggcggaggctgcggcagcagtcgaagcagagcccaaagtcgagtcggagatcatggaggaggatttgaatgataacgcgatcagaggtgatacgtttgtgccgcggggcgaagaaaaaaaagcggaggcggaggccgcggctgaggaggcggccgaggctgtggcagccaccgcggcggtgactgaaacaactgaggagcaggttcaggccgagcaggttcaaaagaagcccgtgattaaagccctaacacaagatagcaaggagcgcagttacaacttgattcccggtagtactgacaccgagtaccgcagctggtacctggcatacaactacggcgacccggtcaaaggggtgcgctcgtggactctgctttgcacgccggacgtcacctgcggctccgagcagatgtactggtcgttgccaaacatgatgcaagacccggtgaccttccgctccacgcggcaggttaacaacttcccggtggtgggcgccgaactgctgcccgtgcactccaagagcttttacaacgagcaggccgtgtactcccagctgatccgccaggccacctctctgacccacgtgttcaatcgctttcccgagaaccagattttggcgcgcccgccggcccccaccatcactaccgtcagtgaaaacgttcctgctctcacagatcacgggacgctaccgctgcgcaacagcatctcaggagtccagcgagtgaccattactgacgccagacgccggacctgcccctacgtttacaaggccttgggcatagtctcgccgcgcgtcctctccagccgcactttttaaaacacatattcacccacgcttcaaagattatgtctatacttatctcacccagcaataacaccggctgggggctgcgcgcgcccagcaagatgtttggaggggcgagaaaacgttccgagcagcacccagtgcgcgtgcgcggccactaccgcgcgccctggggagcgcacaagcgcgggcgcgcagggcgcaccactgtggacgacgccattgactccgtagtggagcaggcgcgccactacacacccggcgcgccgtccgcccccgccgtgtccaccgtggacgaggcgatcgaaagcgtggtacagggcgcgcggcactatgccaaccttaaaaatcgccgccgtcgcgtggcccgccgccatcgccggagaccccgggccaccgccgccgcgcgccttgctaaggctctactcaggcgcgccaggcgaactggccgccgggccgccatgagggccgcacggcgggctgccgccagtgcggccgccgcggccccacgggcacgaaggcgcgcggccgctgccgccgccgccgccatttccagcttggcctcaacgcggcgcggtaacatatactgggtgcgcgactcgataaccggcacgcgggtacccgtgcgctttcgccccccgcggaattagcacaagacaacatacacactgagtctcctgctgttgtgtatcccagcggcgaccgtcagcagcggcgacatgtccaagcgcaaaattaaagaagagatgctccaggtcatcgcgccggagatctatgggcccccgaagaaggaggaggatgattacaagccccgcaagctaaagcgggtcaaaaagaaaaagaaagatgatgatgatgacgaggcggtggagtttgtccgccgcatggcacccaggcgccccgtgcagtggaagggtcggcgcgtgcagcgcgttttgcgccccggcaccgcggtggtcttcacgcccggcgagcgctccacgcgcactttcaagcgggtgtacgatgaggtgtacggcgacgaggacctgttggagcaggccaaccagcgctttggggagtttgcatatgggaaacggccccgcgagagtctaaaagaggacctgctggcgctaccgctggacgagggcaatcccaccccgagtctgaagccggtgaccctgcaacaggtgctgcctttgagcgcgcccagcgagcataagcgagggttgaagcgcgagggcggggacctggcgcccaccgtgcagttgatggtgcccaagcggcagaagctggaggacgtgctggagaaaatgaaagtagagcccgggatccagcccgagatcaaggtccgccccatcaagcaggtggcgcccggcgtgggagtccagaccgtggacgttaggattcccacggaggagatggaaacccaaaccgccactccctcttcagcggccagcgccaccaccggcaccgcttcggtagaggtgcagacggacccctggctacccgccgccgctgtcgccgccgccgccgccccccgttctcgcgggcgcaagagaaattatccagtggccagcgcgctcatgccccagtacgcactgcatccatccatcgcgcccacccccggctaccgcgggtattcgtaccgcccgcgcagatcggccggcactcgcggccgccgccgccgtgcgaccacaaccagccgccgccgtcgccgccgccgccagccagtgctgacccccgtgtctgtaaggaaggtggctcgctcggggagcacgctggtggtgcccagagcgcgctaccaccccagcatcgtttaaagccggtctctgtatggttcttgcagatatggccctcacttgtcgcctccgcttcccggtgccgggataccgaggaagaactcaccgccgcagaggcatggcgggcagcggtctccgcggcggccgtcgccatcgccggcgcgcaaaaagcaggcgcatgcgcggcggtgtgctgcctctgctaatcccgctaatcgccgcggcgatcggtgccgtacccgggatcgcctccgtggccctgcaggcgtcccagaaacgttgactcttgcaaccttgcaagcttgcatttttttggaggaaaaataaaaaagtctagactctcacgctcgcttggtcctgtgactattttgtagaaaaaagatggaagacatcaactttgcgtcgctggccccgcgtcatggctcgcgcccgttcatgggagactggacagatatcggcaccagcagtatgagcggtggcgccttcagctggggcagtctgtggagcggccttaaaaattttggttccaccattaaaaactatggcaacaaagcgtggaacagcagcacgggccagatgctaagagacaagttgaaagagcagaacttccaggagaaggtggcgcagggcctggcctctggcatcagcggggtggtggacatagctaaccaggccgtgcagaaaaagataaacagtcatctggacccccgccctcaggtggaggaaacgcctccagccatggagacggtgtttcccgagggcaaaggcgaaaagcgcccgcggcccgacagggaagagaccctggtgtcacacaccgaggagccgccctcttacgaggaggcactcaaggccggcctgcccaccactcgccccgtagctcccatggccacaggtgtggtgggccataaacaacacacccccgcaacactagatctgcccccgccgtccgagccgccgcgtcagccaaagacggcgacggtgcccgctccctccacttccgccgccaacagagtgtccctgcgccgcactacgggcgcccctcggggaccgcgactgagcggcaactggcagagcacactgaacagcattgtgggcctgggagtgaaaagtgtgaagcgccgccgttgctactgaatgagcaagctagctaacgtgttatatgtgtgtatgcgtcctatgtcgccgccagaggagctgttgagccgcccgcgccgtctgcactccagcgaatttcaagatggcgaccccttcgatgatgccacagtggtcgtacatgcacatctcgggccaggacgcctcggagtacctgagccccgggctggtgcagttcgcccgcgccaccgacagctacttcagcctaagtaacaaatttaggaaccctacggtggcacccacccacgatgtgaccacggaccggtcgcagcgcctgacgctgcggtttatccccgtggatcgggaggacactgcctactcttacaaggcgcgcttcacgctagccgtgggcgacaaccgcgtgctggacatggcctccacctactttgatatccggggtgtgctggacaggggtcccacctttaagccctactcgggcactgcctacaactccctggctcctaaaggcgctcccaattcttgcgagtgggatgaaaaaactaatactgctgaagcagccattgaaaatgaagaagagctggcggatgagccagaagagcaagcagaagaggctataaaaaccaatgtgtttgcccaggcgccatattctggcaatgcaatttccaaagaaggaatacaagtaggcatagaaggcattggagagcaagtaaaagccgtatacgcagacaaaacctaccagccggaacctcaggttggagaaactcaatggaatgagactgaaataaatcatggagcaggaagggtgctgaagaagaccactcccatgaagccttgctatggttcttatgctaaacctactaatgaatatggaggccagggcatccttgtagaaaaaaatggcaaaatggaaagccaggtggaaacacagttttttgctcttgacggtgaaaatgataatagtccaaaagtggtgttgtatagcgaagatgtaaacttggatactcctgacacacacctatcatacaaacctagcgcccaagatgtaaactctaaagaaatgttgggccaacaggccatgcccaacaggccaaatcttattgcttttagggacaactttattggacttatgtactacaacagcactggcaacatgggagtgctggcaggacaggcctcccaactaaatgccgtggtagacttgcaagacagaaacacagagttgtcataccagctgatgcttgattccattggagacagatcaagatattttgccatgtggaaccaggcggttgatagttacgatccagatgttagaattattgaaaaccatggcacagaggatgaacttccaaactactgttttcctttgggaggaatatttaatactcagagttttaaaaaggtaaaacctggaacggataacggatgggaaacagatgatgacttttcagataaaaatgaaataagagttggcaacaactttgccatggagatcaatatccaggcaaacctgtggagaagcttcttgtattccaatgtggctctctacctgccagataagatgaagtactctccaaccaacatagacatttccaccaacactaacacctatgactacatgaacaaaagagtggcgcctccaggcctggtggactgctatgtcaatctgggggccaggtggtcccttgatgtaatggataacatgaacccctttaaccaccaccgcaatgcgggcctgcgataccgttccatgcttctgggtaacggccgctacgtgcccttccacatccaggtgccccaaaagttctttgccatcaaaagccttctactcttgcctggctcgtacacctacgaatggaatttcagaaaggatgtgaacatggtcctacagagctctctgggcaacgaccttagggtggatggggccagcatcaagtttgacagcatcaccctttatgctacctttttccccatggcccacaacaccgcttccacgcttgaggccatgctcagaaacgacaccaacgaccagtccttcaatgactacctctctggggccaacatgctctaccccatccccgccaacgctaccaacgtgcccatctccattccctctcgcaactgggccgccttcagaggctgggcatttacccgccttaagaccaaggagaccccctccctgggctcgggttttgacccctactttgtctactcgggatccatcccctacctggatggcaccttctacctcaaccacacttttaagaagatatccatcatgtatgactcctctgtcagctggccgggcaacgaccgcctgctcacccccaatgagttcgaggtcaagcgcgccgtggacggcgagggctacaacgtggcccagtgcaacatgaccaaggactggttcctggtgcagatgctggccaactacaacataggctaccagggcttctacatcccagagagctacaaggacaggatgtactccttcttcagaaatttccaacccatgagcaggcaggtggtggacgagaccaaatacaaggactatcaggccgttggcatcactcaccagcacaacaactcgggattcgtgggctacctggcacccaccatgcgcgagggacaggcctaccccgccaacttcccctaccccttgataggcaagaccgcggtcgacagcgtcacccagaaaaagttcctctgcgaccgcaccctctggcgcatccccttttctagcaacttcatgtccatgggcgcgctcacggacctgggccagaacctgctctatgccaactccgcccatgcgctggacatgacttttgaggtggaccccatggacgagcccacccttctctatattgtgtttgaagtgttcgacgtggtcagagtgcaccagccgcaccgcggtgtcatcgagaccgtgtacctgcgcacgcccttctcggccggcaacgccaccacctaaggagacagcgccgccgcctgcatgacgggttccaccgagcaagagctcagggccatcgccagagacctgggatgcggaccctattttttgggcacctatgacaaacgcttcccgggcttcatctcccgagacaagctcgcctgcgccatcgtcaacacggccgcgcgcgagaccgggggcgtgcactggctggcctttggctgggacccgcgctccaaaacttgctacctctttgacccttttggcttctccgatcagcgcctcaagcagatctatgagtttgagtacgaggggctgctgcgccgcagcgcgcttgcctcctcgcccgaccgctgcatcacccttgagaagtccaccgagaccgtgcaggggccccactcggccgcctgcggtctcttctgctgcatgtttttgcacgcctttgtgcgctggccccagagtcccatggatcgcaaccccaccatgaacttgctcaagggagtgcccaacgccatgctccagagcccccaggtccagcccaccctgcgccacaaccaggaacagctctaccgcttcctggagcgccactccccctacttccgcagtcacagcgcgcgcatccggggggccacctctttctgccacttgcaagaaaacatgcaagacggaaaatgatgtacagctcgctttttaataaatgtaaagactgtgcactttatttatacacgggctctttctggttatttattcaacaccgccgtcgccatctagaaatcgaaagggttctgccgcgcgtcgccgtgcgccacgggcagagacacgttgcgatactggaagcggctcgcccacttgaactcgggcaccaccatgcggggcagtggttcctcggggaagttctcgccccacagggtgcgggtcagctgcagcgcgctcaggaggtcgggagccgagatcttgaagtcgcagttggggccggaaccctgcgcgcgcgagttgcggtacacggggttgcagcactggaacaccagcagggccggattatgcacgctggccagcaggctctcgtcgctgatcatgtcgctgtccagatcctccgcgttgctcagggcgaatggggtcatcttgcagacctgcctgcccaggaaaggcggcagcccgggcttgccgttgcagtcgcagcgcaggggcatcagcaggtgcccgcggcccgactgcgcctgcgggtacagcgcgcgcatgaaggcttcgatctgcctgaaagccacctgcgccttggctccctccgaaaagaacatcccacaggacttgctggagaactggttcgcgggacagctggcatcgtgcaggcagcagcgcgcgtcggtgttggcgatctgcaccacgttgcgaccccaccggttcttcactatcttggccttggaagcctgctccttcagcgcgcgctggccgttctcgctggtcacatccatctctatcacctgctccttgttgatcatgtttgtcccgtgcagacacttcaggtcgccctccgtctgggtgcagcggtgctcccacagcgcgcaaccggtgggctcccaattcttgtgggtcacccccgcgtaggcctgcaggtaggcctgcaagaagcgccccatcatggccacgaaggtcttctggctcgtaaaggtcagctgcaggccgcgatgctcttcgttcagccaggtcttgcagatggcggccagcgcctcggtctgctcgggcagcatcctaaaatttgtcttcaggtcgttatccacgtggtacttgtccatcatggcgcgcgccgcctccatgcccttctcccaggcggacaccatgggcaggcttagggggtttatcacttccaccggcgaggacaccgtactttcgatttcttcttcctccccctcttcccggcgcgcgcccacgctgctgcgcgctctcaccgcctgcaccaaggggtcgtcttcaggcaagcgccgcaccgagcgcttgccgcccttgacctgcttaatcagcaccggcgggttgctgaagcccaccatggtcagcgccgcctgctcttcttcgtcttcgctgtctaccactatctctggggaagggcttctccgctctgcggcggtgcgcttcttttttttcttgggagcagccgtgacggagtccgccacggcgacggaggtcgagggcgtggggctgggggtgcgcggtaccagggcctcgtcgccctcggactcttcctctgactccaggcggcggcggagtcgcttctttgggggcgcgcgcgtcagcggcggcggagacggggacggggacggggacgggacgccctccacagggggtggtcttcgcgcagacccgcggccgcgctcgggggtcctctcgagctggtcttggtctcgactggccattgtatcctcctcctcctaggcagagagacataaggagtctatcatgcaagtcgagaaggaggagagcttaaccaccccctctgacaccgccgatgcgcccgccgtcgccgtcgcccccgctgccgccgacgcgcccgccacaccgagcgacacccccgcggacccccccgccgacgcacccctgttcgaggaagcggccgtggagcaggacccgggctttgtctcggcagaggaggatttgcgagaggaggagaataaggagaagaagccctcagtgccaaaagatgataaagagcaagacgagcacgacgcagatgcacaccagggtgaagtcgggcggggggacggagggcatggcggcgccgactacctagacgaagggaacgacgtgctcttgaagcacctgcatcgtcagtgcgccatcgtttgcgacgctctgcaggagcgcagcgaagtgcccctcagcgtggcggaggtcagccacgcctacgagctcagcctcttctccccccgggtgcccccccgccgccgcgaaaacggcacatgcgagcccaacccgcgcctcaacttctaccccgccttcgtggtgcccgaggtcctggccacctatcacatcttctttcaaaattgcaagatccccctctcgtgccgcgccaaccgtagccgcgccgataagatgctggccctgcgccagggcgaccacatacctgatatcgccgctttggaagatgtgccaaagatctttgagggtctgggtcgcaacgagaagcgggcagcaaactctctgcaacaggaaaacagcgaaaatgagagtcacaccggggtactggtggagctcgagggcgacaacgcccgcctggcggtggtcaagcgcagcatcgaggtcacccactttgcctaccccgcgctaaacctgccccccaaagtcatgaacgcggccatggacgggctgatcatgcgccgcggccggcccctcgctccagatgcaaacttgcatgaggagaccgaggacggccagcccgtggtcagcgacgagcagctggcgcgctggctggagaccgcggaccccgccgaactggaggagcggcgcaagatgatgatggccgcggtgctggtcaccgtagagctggagtgtctgcagcgcttcttcggcgaccccgagatgcagagaaaggtcgaggagaccctgcactacaccttccgccagggctacgtgcgccaggcttgcaagatctccaacgtggagctcagcaacctggtgtcctacctgggcatcttgcatgagaaccgcctcgggcagagcgtgctgcactccaccctgcgcggggaggcgcgccgcgactacgtgcgcgactgcgtttacctcttcctctgctacacctggcagacggccatgggggtctggcagcagtgtctggaggagcgcaacctcaaagagctggagaagctcctgcagcgcgcgctcaaagacctctggacgggctacaacgagcgctcggtggccgccgcgctggccgacctcatcttccccgagcgcctgctcaaaaccctccagcaggggctgcccgacttcaccagccaaagcatgttgcaaaacttcaggaactttatcctggagcgttctggcatcctacccgccacctgctgcgccctgcccagcgactttgtccccctcgtgtaccgcgagtgccccccgccgctgtggggtcactgctacctgttccaactggccaactacctgtcctaccacgcggacctcatggaggactccagcggcgaggggctcatggagtgccactgccgctgcaacctctgcacgccccaccgctccctggtctgcaacacccaactgctcagcgagagtcagattatcggtaccttcgagctacagggtccgtcctcctcagacgagaagtccgcggctccggggctaaaactcactccggggctgtggacttccgcctacctgcgcaaatttgtacctgaagactaccacgcccacgagatcaggttttacgaggaccaatcccgcccgcccaaggcggagctgaccgcctgcgtcatcacccagggcgagatcctaggccaattgcaagccatccaaaaagcccgccaagattttttgctgaagaagggtcggggggtgtatctggacccccagtcgggtgaggagctcaacccggttcccccgctgccgccgccgcgggaccttgcttcccaggataagcatcgccatggctcccagaaagaagcagcagcggccgccactgccgccaccccacatgctggaggaagaggaggaatactgggacagtcaggcagaggaggtttcggacgaggaggagccggagacggagatggaagagtgggaggaggacagcttagacgaggaggcttccgaagccgaagaggcagacgcaacaccgtcaccctcggccgcagccccctcgcaggcgcccccgaagtccgctcccagcatcagcagcaacagcagcgctataacctccgctcctccaccgccgcgacccacggccgaccgcagacccaaccgtagatgggacaccaccggaaccggggccggtaagtcctccgggagaggcaagcaagcgcagcgccaaggctaccgctcgtggcgcgctcacaagaacgccatagtcgcttgcttgcaagactgcggggggaacatctccttcgcccgccgcttcctgctcttccaccacggtgtggccttcccccgtaacgtcctgcattactaccgtcatctctacagcccctactgcggcggcagtgagccagagacggtcggcggcggcggcgcccgtttcggcgcctaggaagacccagggcaagacttcagccaagaaactcgcggcggccgcggcgaacgcggtcgcgggggccctgcgcctgacggtgaacgaacccctgtcgacccgcgaactgaggaaccgaatcttccccactctctatgccatcttccagcagagcagagggcaggatcaggaactgaaagtaaaaaacaggtctctgcgctccctcacccgcagctgtctgtatcacaagagcgaagaccagcttcggcgcacgctggaggacgctgaggcactcttcagcaaatactgcgcgctcactcttaaggactagctccgcgcccttctcgaatttaggcgggaacgcctacgtcatcgcagcgccgccgtcatgagcaaggacattcccacgccatacatgtggagctatcagccgcagatgggactcgcggcgggcgcctcccaagactactccacccgcatgaactggctcagtgccggcccacacatgatctcacaggttaatgatatccgcacccatcgaaaccaaatattggtggagcaggcggcgattaccaccacgccccgcaataatcccaaccccagggagtggcccgcgtccctggtgtatcaggaaattcccggccccaccaccgtactacttccgcgtgattcccaggccgaagtccaaatgactaactcaggggcgcagctcgcgggcggctgtcgtcacagggtgcggccccctcgccagggtataactcacctggagatccgaggcagaggtattcagctcaacgacgagtcggtgagctcctcgctcggtctcagacctgacgggaccttccagatagccggagccggccgatcttccttcacgccccgccaggcgtacctgactctgcagagctcgtcctcggcgccgcgctcgggcggcatcgggactctccagttcgtgcaggagtttgtgccctcggtctacttcaaccccttctccggctctcccggtcgctacccggaccagttcatctcgaactttgacgccgcgagggactcggtggacggctacgactgaatgtcgggtggacccggtgcagagcaacttcgcctgaagcacctcgaccactgccgccgccctcagtgctttgcccgctgtcagaccggtgagttccagtacttttccctgcccgactcgcacccggacggcccggcgcacggggtgcgctttttcatcccgagtcaggtgcgctctaccctaatcagggagtttaccgcccgtcccctactggcggagttggaaaaggggccttctatcctaaccattgcctgcatctgctctaaccctggattgcaccaagatctttgctgtcatttgtgtgctgagtataataaaggctgagatcagaatctactcgggctcctgtcgccatcctgtcaacgccaccgtccaagcccggcccgatcagcccgaggtgaacctcacctgcggtctgcaccggcgcctgagaaaatacctagcttggtactacaacagcactccctttgtggtttacaacagctttgaccaggacggggtctcactgagggataacctctcgaacctgagctactccatcaggaagaacagcaccctcgagctacttcctccttacctgcccgggacttaccagtgtgtcaccggtccctgcacccacacccacctgttgatcgtaaacgactctcttccgagaacagacctcaataactcctcttcgcagttccccagaacaggaggtgagctcaggaaaccccgggtaaagaagggtggacaagagttaacacttgtggggtttctggtgtatgtgacgctggtggtggctcttttgattaaggcttttccttccatgtctgaactctccctcttcttttatgaacaactcgactagtgctaacgggaccctacccaacgaatcgggattgaatatcggtaaccaggttgcagtttcacttttgattaccttcatagtcctcttcctgctagtgctgtcgcttctgtgcctgcggatcgggggctgctgcatccacgtttatatctggtgctggctgtttagaaggttcggagaccatcgcaggtagaataaacatgctgctgcttaccctctttgtcctggcgctggccgccagctgccaagccttttccgaggctgattttatagaaccccagtgcaatatcacttataaatctgaatataacctctgcactatcctaattaaatgcgttactcaacacgatgaggtaactgttagatacaaagatcaatcaaaaagagacgcactttacagcagctggcaaccaggagatgaacaaaaatacaatgtgaccgtcttccagggcaaactctccaaaacttacaattacactttcccattcgaggagatgtgtgagtttgtcatgttcatgtcaaagcagtacaagatgtggcctccgactccccagggctgtgtggaaaatccaggctctttctgcatgatctctctctgtgtaactgtgctggcactaatactcacgcttttgtatatcagatttaaatcaaggcaaagcttcatcgatgaaaagaaaatgccttaatcgcttttcacgcttgattgctaacaccgggtttttatccgcagaatgattggaatcaccctactaatcacctccctccttgcgattgcccatgggttggaacgaatcgaagtccctgtgggggccaatgttaccctggtggggcctgtcggcaatgctacattaatgtgggaaaaatatactaaaaatcaatgggtctcttactgcactaacaaaaacagccacaagcccagagccatctgcgatgggcaaaatttaaccttgattgatgttcaattgctggatgcgggctactattatgggcagctgggtacaatcgttaattactggagaccccacaaagattacatgcttcacgtagtaaagggtccccttagcagcccgaccactaccaccacctctaccacacccactaccaccactactcccatcaccagcactgccacccagcctcctcatagcagaacaaccacttttatcaattccaagtcccactccccccacattgccggcgggccctccgcctcaaactccgagaccaccgagatctgcttctgcaaatgctctgacgccattgcccaggatttggaagaccacgaggaagatgagcatgacttcgcagatgcatgccaggcatcaggggcagaagcactgccggtggccctcaaacagtatgcagactcccataccacccccgatcttccaccgccttcccagaagccaagtttcctgggggaaaatgaaacactgcctctctccatacttgctttgacatctgttgctattctgactgctctgctggtgctcctatgctctatatgctacctgatctgctgcaggaagaaaaaatctcacggccatgctcaccagccgcttatgcacttcccttaccctccagagttgggcgaccacaaactttaagtctgcagtagctatctgcccatcccttgtcagtcgacagcgatgagccccactaatctaacggcctctggacttacaacattgtctcttaatgagaccaccgctcctcaagacctgtacgatggtgtctccgcgctggttaaccagtgggatcacctgggcatatggtggctcctcataggagcagtgaccctgtgcctaatcctggtctggataatctgctgcatcaaaagcagaagacccaggcggcggcccatctacaggcccttcgtcatcacacctgaagatgatgatggcaccacgtccaggctgcagagcctaaagcagctactcttctcttttacagcatggtaaattgaacatgcctcgcattttcatctacttgtttcttcttccactctttttgggctcttctacattggcagctgtgtcccacatcgaggtagactgcatctcgcccttctcagtctacttactcttcggctttgtcatttgcaactttgtctgcagcgttatcactgtagtgatctgcttcatacagtgcatcgactacgtctgcgtacgggtggcctattttagacaccacccccagtatcgcaacagggacatagcggctctcctaagacttgtttaaatcatgcccaaattaactgtgattgctcttctgattatctgctgcgtcctagccgcgattgggactcagcctactaccaccaccaccagcgctcccagaaagagacatgtttcctgcagcttcaaacgtccctggaatataccccaatgctttactgatgaacctgaaatctctttggcttggtacttcagcgtcaccgcccttctcatcttctgcagtacggttattgcccttgccatttacccttcccttgacctgggctggaatgctgtcaactctatggaatatcccaccttcccagaaccagacctgccagacctggttgttctaaacgcgtttcctcctcctcccgttcaaaatcagtttcgccctccgtccccgacgcccactgaggtcagctactttaatctaacaggcggagatgactgaaaacctagacctagaaatggacggcctctgcagcgaacaacgcatactagagaggcgccggcaaaaagcagagctcgagcgtcttaaacaagagctccaagacgcggtggccatacaccagtgcaaaaaaggtgtcttctgtctagtgaaacaggccacgctcacctatgaaaaaacaggtgacacccaccgcctaggatacaagctgcccacacaacgccagaagttcgcccttatgataggcgaacaacccatcaccgtcacccagcactctgtggagacagaaggctgcatacacgctccctgcaggggcgctgactgtctctacaccttgatcaaaaccctctgcggccttagagacctcatccctttcaattgatcataactgtaatcaataaaaaatcacttacttgaaatctgatagcaagcctctgtccaattttttcagcaacacttccttcccctcctcccaactctggtactctaggcgcctcctagctgcaaacttcctccacagtctgaagggaatgtcagattcctcctcctgtccctccgcacccacgatcttcatgttgttgcagatgaaacgcgcgagatcgtctgacgagaccttcaaccccgtgtacccctacgataccgagatcgctccgacttctgtcccttttcccacccctccctttgtgtcccccgcaggaatgcaagaaaacccccctggagtgctatccctacgccttgcagaacccttgaccacctccaatggagcgctgaccctaaaaatggggggtggtttgaccctggacgaagaaggaaagcttacttcccaaaatattaccagtgttgatcctcctcttaaaaaaacaaaaaacaatatcagtctgcagactgcctccccccttgccgtcagctcgggagccctcacacttttcgctactcctcccctggcagttaatgacaataacctaactgtgcagtctcaggctccccttacactggaaaactcaaaactaagtctggccaccaaaggccccctaaccgtttctgaaggaaaacttgccctagaaacagaggctcccttgcatgcaagcgacagcagtagcctaggccttagtgtaacggccccactgagcattagcagcgacagcctaggactagacttgcaagcgcccattatttctgaaaatggaaaactgggcctaagagtaacaggtcccctaactgtggccagcagtattgatgctttgacagtagccacaggcagcggtattggacttgatagcaacacgcgcctacaggcaaaattggtcgcgcccctaggctttgacaccaatggcaacattaagctcagcacttcgggcggcatgagactgaacaatggcacacttatactagatgtaaactacccatttgaggctcaaggtcaacttagtctaagagtgggttcgggtccactgtatgtagactccaacacacataacctaaccgctagatgccttagagggctatacataacgtcatctaataaccaaaccggcctggaggccaacataaaacttacaaaaggacttgtgtttgatggaaatgccatagcagttaatgttagcaaagggctagaatacagtaccactgaaacagcgcagggtgtaaatcccatacagactaaaataggtttgggcatggaatatgataccaatggagccataaagccaagactaggctctggtttgagctttgataattcaggagctattgtagtgggaaacaaaaatgatgacactcttactctgtggactacaccagacccatctcccaactgtcagattaactcggaaaaagatgctaaactaaccttggtactaaccaagtgcggtagtcaaattgtaggcacagtatctgcctttgctcttaaaggcagccttgccccaattaatggcacagtgagctcagttagtatattcctaagatttaatgaaaatggggtactgatgagcaactcatcgttggaaagccaatactggaattacaggaatggaaattcaactaatgccacaccatatacaaatgcactaggttttatgcctaacctggcagcttatcccaaaggccaggcaacgactgcaaaaagcagcatcattagccaggtttacatgaatggtgacacttccaaacctatgatatttacaataacttttaatgggcttgaaacagaggaaactcaggtcagtacatattccatgacattttcatggaggtggacaaatggagactacgtggggcactattttaaaacaaactcctttactttctcctacattgcccaagaataaagaaagcacagagatgcttgtttttgatttcaaaattgtgtgcttttatttatttcaagcttacagtatttccagtagtcattcgaatagagcttaattaaactgcatgagaacccttccacatagcttaaattagcaccagtgcaaatggagaaaaatcaacatacctttttatccagatatcagagaactctagtggtcagttttcccccaccctcccagctcacagaatacacagtcctttccccccggctggctttaaacaacactatctcattggtaacagacatattcttaggtgtaataatccacacggtctcttggcgggccaaacgctggtcggtgatgttaataaactccccaggcagctctttcaagttcacgtcgctgtccaactgctgaagcgctcgcggctccgactgcgcctctagcggaggcaacggcaacacccgatccttgatctataaaggagtagagtcataatcccccataagaatagggcggtgatgcagcaacaaggcgcgcagcaactcctgccgccgcctctccgtacggcaggaatgcaacggcgtggtggtctcctccgcgataatccgcaccgctcgcagcatcagcatcctcgtcctccgggcacagcagcgcatcctgatctcactgagatcggcgcagtaagtgcagcacaaaaccaagatgttatttaagatcccacagtgcaaagcgctgtacccaaagctcatggcgggaaggacagcccccacgtgaccatcataccagatcctcaggtaaatcaaatgacgacctctcataaacacgctggacatgtacatcacctccttgggcatgtgctgattcaccacctctcgataccacaagcatcgctgattaattaaagacccctcgagcaccatcctgaaccaggaagccagcacctgaccccccgccaggcactgcagggaccccggtgaatcgcagtggcagtgaagactccagcgctcgtagccgtgaaccatagagctggtcattatatccaaattggcacaacacagacacactttcatacactttttcatgattagcagctcctctctagtcaggaccatatcccaaggaatcacccactcttgaatcaaggtaaatcccacacagcagggcaggcctctcacataactcacgttatgcatagtgagcgtgtcgcaatctggaaataccggatgatcttccatcaccgaagcccgggtctccgtctcaaagggaggtaaacggtccctcgtgtagggacagtggcgggataatcgagatcgtgttgaacgtagagtcatgccaaagggaacagcggacgtactcatatttcctccagcagaaccaagtgcgcgcgtggcagctatccctgcgtcttctgtctcgccgcctgccccgttcggtgtagtagttgtaatacagccactccctgagaccgtcaaggcgctccctggcgtccggatctatgacaacaccgtcctgcagcgccgccctgatgacatccaccaccgtagagtatgccaagcccagccaggaaatgcattcactttgacagcgagagataggaggagcggggagagatggaagaaccatgatagtaaagagaacttttattccaatcgatcttctaagatatcaaagtggagatctataagatgacactggtctcctccgctgagtcgatcaaaaataacagctaaaccacaaacaacacgattggtcaaatgctccacaagggcctgcagcataaaattgcctcggaactccaccgcaagcataacatcaaagccaccgcctctatcgtgatcaagaataaaaaccccacagctatccaccagacccatatagttttcatctctccatcgtgaaaaaagatttacaagctcctcctttaaatcacctccaaccaattgaaaaagttgaaccagaccgccctccaccttcattttcagcaagcgtatcatgattgcaaaaattcaggctcctcagacacctgtataagattgagaagcggaacgttaacatcgatgtttcgctcgcgtaaatcacgcctcagtgcaagcataatataatcccacaggtcggagcggatcagcgaggacacctccccgccaggaaccaactcaacggagcctatgctgattataatacgcatattcggagctatgctaaccagcacggcccccaaataggcgtactgcataggcggcgacaaaaagtgaacagtttgggttaaaaaatcaggcaaacactcgcgcaaaaaagcaagaacatcataaccatgctcatgcaaatagatgcaagtaagctcaggaacgaccacagaaaaatgcacaatttttctctcaaacatgactgcgagccctgcaaaaaataaaaaagaaacattacacaagagtagcctgtcttacgatgggatagactactctaaccaacataagacgggccacaacatcgcccgcgtggccataaaaaaaattgtccgtgtgattaaaaagaagcacagatagctggccagtcatatccggagtcatcacgtgtgaacccgtgtagacccccgggttggacacatcggccaaagaaagaaagcggccaatgtacccaggaggaattataacactaagacgaagatacaacagaataaccccatgagggggaataacaaagttagtaggtgaataaaaacgataaacacccgaaactccctcctgcgtaggcaaaatagcaccctccccttccaaaacaacatatagcgcttccacagcagccatgacaaaagactcaaaacactcaaaagactcagtcttaccaggaaaataaaagcactctcacagcaccagcactaatcagagtgtgaaaagggccaagtgccgaacgagtatatataggaataaaaaatgacgtaaatgtgtaaaggtcagaaaacgcccagaaaaatacacagaccaacgcccgaaacgaaaacccgcgaaaaaatacccagaacttcctcaacaaccgccacttccgctttctcacgatacgtcacttccgcaagaaaagcaaaactacatttcccacatgtgtaaaaacgaaaccccgccccttctaaccgcccacaacttacatcatcaaaacgtaaagtcctacgtcacccgccccgcctctccccgcccacctcattatcatattggccacaatccaaaataaggtatattat

SEQ ID NO: 58 - DNA, 37058 bp, Gorilla beringei graueri
ataatataccttattttggattgtggccaatatgataatgaggtgggcggggagaggcggggcgggtgacgtaggacgcgcgagtagggttgggaggtgtggcggaagtgtggcatttgcaagtgggaggagctcacatgcaagcttccgtcgcggaaaatgtgacgtttttgatgagcgccgcctacctccggaagtgccaattttcgcgcgcttttcaccggatatcgtagtaattttgggcgggaccatgtaagatttggccattttcgcgcgaaaagtgaaacggggaagtgaaaactgaataatagggcgttagtcatagcgcgtaatatttaccgagggccgagggactttgaccgattacgtggaggactcgcccaggtgttttttacgtgaatttccgcgttccgggtcaaagtctccgtttttattgtcaccgtcatttgacgcggagggtatttaaacccgctgcgctcctcaagaggccactcttgagtgccagcgagaagagttttctcctctgctccgcttcggtgatcgaaaaatgagacacatagcctgcactccgggtcttttgtccggtcgggcggcggccgagcttttggacgctttgatcaatgatgtcctgagcgatgattttccgtctactacccactttagcccacctactcttcacgaactgtacgatctggatgtactggtggatgtgaacgatcccaacgaggaggcggtttctgcgttttttcccgagtctgcgctgttggccgctcaggagggatttgacctacacactccgccgcctattttagagtctccgctgccggagcccagtggtataccttatatgcctgaactgcttcccgaagtggtagacctgacctgccacgagcctggctttccgcccagcgacgatgatggtgagccttttgttttagactttgctgagatacctgggcacggttgcaggtcttgtgcatatcatcagagggttaccggagaccccgaggttaagtgttcgctgtgctatatgaggatgacctcttcctttatctacagtaagtttttgtctaggtgggcttttgggtaggtgggttttgtgtcagaacaggtgtaaacgttgcttgtgttttttgtacctgtaggtccggtgtccgagccagacccggagcccgaccgcgatcccgagccggatcccgagcctcctcgcaggacaaggaaactaccttccattctgtgcaagtctcagacacctgtaaggaccagcgaggcagacagcaccgactctggcacttctacctctccccctgaaattcacccagtggttcctctgggtatacataaacctgttgctgttagagtttgcgggcgacgccctgcagtacagtgcattgaggacttgcttcacgatcccgaggaacctttggacttgagccttaaacgccctaggcaataaaccccacctaagtaataaaccccacctaagtaataaaccctgccgcccttggttattgagatgacgcccaatgtttgcttttgaatgacttcatgtgtgtaataaaagtgagtgtgatcataggtctcttgtttgtctgggcggggcttaagggtatataagtttctcggggctaaacttggttacacttgaccccaatggaggcgtgggggtgcttggaggagtttgcggacgtgcgccgtttgctggacgagagctctaaccatacctatactatttggaggtatctgtggggctctactcaggccaagttggtctccagaattaagcaggattacaagtgcgattttgaagagctttttagttcctgcggtgagcttttgcaatccttgaatctgggccatcaggctattttccaggaaaaggttctctcgactttggatttttccactcccgggcgcaccgccgcttgtgtggcttttgtgtcttttgtgcaagataaatggagcgaggagacccacctgagtcacggctacgtactggatttcatggcgatggctctttggagggctcacaacaaatggaagattcagaaggaactgtacggttccgccctacgtcgtccacttttgtcgcgacaggggctgaggtttcccgaccatcggcagcatcagaatctggaagacgagtcggaggagcgagcggaggagaagatcagcttgagagccggcctggaccctcctcaggaggaatgaatctcccgcaggtggttgacctgtttccagaactgagacgggtcctgactatcagggaggatggtcagtttgtgaagaagtttaagagggatcggggtgagggagatgatgaggcggctagcaatttagcttttagtctgatgactcgccaccgaccggaatgtattacctatcagcagattaaggagagttgtgccaacgagctggatcttttgggtcagaagtatagcatagaacagcttaccacttactggcttcagcctggggatgattgggaagaggcgatcagggtgtatgcaaaggtggccctgcggcccgattgcaagtataagattactaagttggttaatattagaaactgctgctatatttctgggaacggggccgaagtggagatagatactcaggacagggtggcttttaggtgttgcatgataaacatgtggcccgggatactggggatggatggggtggtgttcatgaatgtgaggtttacgggccccaactttaatggcacggtgttcatgggcaacaccaacttgctcctgcatggtgcgagtttctatgggtttaataacacctgtatagaggcctggaccgatgtaaaggttcgaggttgttccttttatagctgttggaaggcggtggtgtgtcgccctaaaagcaggggttctgtgaaaaaatgcttgtttgaaaggtgcaccttaggcatcctctctgagggcaactccagggtgcgccataatgtggcttcgaactgcggttgcttcatgcaagtgaagggggtgagcgttatcaagcataactcggtgtgtggaaactgcgaggatcgcgcctcccagatgctgacctgctttgatggtaactgtcacctgttgaagaccattcatataagcagccaccccagaaaggcctggcccgtgtttgagcataacatcctgacccgctgctccttgcatctgggggtcaggaggggtatgttcctgccttaccagtgtaactttagccacactaaaatcctgctggaacccgagtgtatgaccaaggtcagcctaaatggcgtgtttgatgcgactctgagaatctggaaggtgctgaggtatgatgagaccaggaccaggtgccgaccctgcgagtgcggcggcaagcacatgagaaatcagcctgtgatgttggatgtgaccgaggagcttaggcctgaccatctggtgctggcctgcaccagggccgagtttgggtctagcgatgaggataccgattgaggtgggtaaggtgggcgtggctagaagggtggggcgtgtataaattgggggtctaagggtctctctgttttgtcttgcaacagccgccgccatgagcgacaccggcaacagctttgatggaagcatctttagcccctatctgacagtgcgcatgcctcactgggctggagtgcgtcagaatgtgatgggttccaacgtggatggacgccccgttctgccttcaaattcgtctacaatggcctacgcgaccgtgggaggaactccgctggacgccgcgacctccgccgccgcctccgccgccgccgcgaccgcgcgcagcatggctacggacctttacagctctttggtggcgagcggcgcggcctctcgcgcgtctgctcgggatgagaaactgaccgctctgctgcttaaactggaagacttgacccgggagctggctcaactgacccagcaggtctccagcttgcgtgagagcagccttgcctccccctaatggcccataatataaataaaagccagtctgtttggattaagcaagtgtatgttctttatttaactctccgcgcgcggtaagcccgggaccagcggtctcggtcgtttagggtgcggtggattctttccaacacgtggtacaggtggctctggatgtttagatacatgggcatgagtccatccctggggtggaggtagcaccactgcagagcttcgtgctcgggggtggtgttgtatatgatccagtcgtagcaggagcgctgggcgtggtgctgaaaaatgtccttaagcaagaggcttatagctagggggaggcccttggtgtaagtgtttacaaatctgctcagttgggaggggtgcatccggggggatataatgtgcatcttggactggatttttaggttggctatgttcccacccagatcccttctgggattcatgttgtgcaggaccaccagcacggtatatccagtgcacttgggaaatttatcgtggagcttagacgggaatgcatggaagaacttggagacgcccttgtggcctcccagattttccatacattcgtccatgatgatggcaatgggcccgtgggaagctgcctgagcaaaaatgtttctgggatcgctcacatcgtagttatgttccagggtgaggtcatcataagacatctttacaaatcgggggcggagggtcccggactggggtatgatggtaccctcgggccccggggcgtagttcccctcacagatctgcatctcccaggctttcatttcagagggagggatcatatccacctgcggagcgatgaaaaacacagtttctggcgcaggggagattaactgggatgagagcaggtttctgagcagctgtgactttccacagccggtgggcccatatatcacgcctatcaccggctgcagctggtagttaagagagctgcagctgccgtcctcccggagcaggggggccacctcgttcagcatatccctgacgtggatgttctccctgaccaattccgccagaaggcgctcgccgcccagcgaaagcagctcttgcaaggaagcaaaatttttcagcggttttaggccgtcggccgtgggcatgtttttcagcgtctgggtcagcagttccagcctgtcccacagctcggtgatgtgctctacggcatctcgatccagcagatctcctcgtttcgcgggttggggcggctttcgctgtagggcaccagccgatgggcgtccagcggggccagagtcatgtccttccatgggcgcagggtcctcgtcagggtggtctgggtcacggtgaaggggtgcgctccgggttgggcgctggccagggtgcgcttgaggctggttctgctggtgctgaatcgctgccgctcttcgccctgcgcgtcggccaggtagcatttgaccatggtctcgtagtcgagaccctcggcggcgtgccccttggcgcggagctttcccttggaggtggcgccgcacgaggggcactgcaggctcttcagggcgtagagcttgggagcgagaaacacggactctggggagtaggcgtccgcgccgcaggaagcgcagaccgtctcgcattccaccagccaagtgagctccgggcggtcagggtcaaaaaccaggttgcccccatgctttttgatgcgtttcttacctcggctctccatgaggcggtgtcccttctcggtgacgaagaggctgtccgtgtccccgtagaccgacttcaggggcctgtcttccagcggagtgcctctgtcctcctcgtagagaaactctgaccactctgagacgaaggcccgcgtccaggccaggacgaaggaggccacgtgggaggggtagcggtcgttgtccactagcgggtccaccttctccagggtgtgcaggcacatgtccccctcctccgcgtccagaaaagtgattggcttgtaggtgtaggacacgtgaccgggggttcccgacgggggggtataaaagggggtgggcgccctttcatcttcactctcttccgcatcgctgtctgcgagagccagctgctggggtaagtattccctctcgaaggcgggcatgacctcagcgctcaggttgtcagtttctaaaaatgaggaggatttgatgttcacctgtcctgaggtgatacctttgagggtacctgggtccatctggtcagaaaacactatttttttgttgtcaagcttggtggcgaacgacccgtagagggcgttggagagcagcttggcgatggagcgcagggtctggtttttgtcgcggtcggctcgctccttggccgcgatgttgagttgcacgtactcgcgggccacgcacttccactcggggaagacggtggtgcgctcgtctgggatcaggcgcaccctccagcctcggttgtgcagggtgaccatgtcgacgctggtggcgacctcgccgcgcaggcgctcgttggtccagcagaggcggccgcccttgcgcgagcagaaggggggtagggggtccagctggtcctcgtttggggggtccgcgtcgatggtgaagaccccggggagcaagcgcgggtcaaagtagtcgatcttgcaagcttgcatgtccagagcccgctgccattcgcgggcggcgagcgcgcgctcgtaggggttgaggggcgggccccagggcatggggtgggtgagcgcggaggcgtacatgccgcagatgtcatacacgtacaggggttccctgaggatgccgaggtaggtggggtagcagcgccccccgcggatgctggcgcgcacgtagtcatagagctcgtgggagggggccagcatgttgggcccgaggttggtgcgctgggggcgctcggcgcggaaggcgatctgcctgaagatggcatgggagttggaggagatggtgggccgctggaagacgttgaagcttgcttcttgcaagcccaccgagtccctgacgaaggaggcgtaggactcgcgcagcttgtgcaccagctcggcggtgacctggacgtcgagcgcgcagtagtcgagggtctcgcggatgatgtcatacttatcctcccccttctttttccacagctcgcggttgaggacgaactcttcgcggtctttccagtactcttggaggggaaacccgtccgtgtccgaacggtaagagcctagcatgtagaactggttgacggcctggtaggggcaacagcccttctccacgggcagcgcgtaggcctgcgccgccttgcggagggaggtgtgggtgagggcgaaagtgtccctgaccatgactttgaggtattgatgtttgaagtctgtgtcatcgcagccgccctgttcccacagggtgtagtccgtgcgctttttggagcgcgggttgggcagggagaaggtgaggtcattgaagaggatcttccccgctcgaggcatgaagtttctggtgatgcgaaagggccctgggaccgaggagcggttgttgatgacctgggcggccaggacgatctcgtcaaagccgtttatgttgtggcccacgatgtagagctccaaaaagcggggctggcccttgatggaggggagctttttgagttcctcgtaggtgagctcctcgggcgattccaggccgtgctcctccagggcccagtcttgcaagtgagggttggccgccaggaaggatcgccagaggtcgcgggccatgagggtctgcaggcggtcgcggaaggttctgaactgtcgccccacggccatcttttcgggggtgatgcagtagaaggtgagggggtctttctcccaggggtcccatctgagctctcgggcgaggtcgcgcgcggcggcgaccagagcctcgtcgccccccagtttcatgaccagcatgaagggcacgagctgcttgccaaaggctcccatccaagtgtaggtctctacatcgtaggtgacaaagaggcgctccgtgcgaggatgagagccgatcgggaagaactggatctcccgccaccagttggaggattggctgttgatgtggtgaaagtagaagtcccgtctgcgggccgagcactcgtgctggcttttgtaaaagcgaccgcagtactggcagcgctgcacgggttgtatatcttgcacgaggtgaacctggcgacctctgacgaggaagcgcagcgggaatctaagtcccccgcctggggtcccgtgtggctggtggtcttctactttggttgtctggccgccagcatctgtctcctggagggcgatggtggagcagaccaccacgccgcgagagccgcaggtccagatctcggcgctcggcgggcggagtttgatgacgacatcgcgcacattggagctgtccatggtctccagctcccgcggcggcaggtcagctgggagttcctggaggttcacctcgcagagacgggtcaaggcgcgggcagtgttgagatggtatctgatttcaaggggcgtgttggcggcggagtcgatggcttgcaggaggccgcagccccggggggccacgatggttccccgcggggcgcgaggggaggcggaagctgggggtgtgttcagaagcggtgacgcgggcgggcccccggaggtagggggggttccggccccacgggcatgggcggcaggggcacgtcttcgccgcgcgcgggcaggggctggtgctggctccgaagagcgcttgcgtgcgcgacgacgcgacggttggtgtcctgtatctggcgcctctgagtgaagaccacgggtcccgtgaccttgaacctgaaagagagttcgacagaatcaatctcggcatcgttgacagcggcctggcgcaggatctcctgcacgtcgcccgagttgtcctggtaggcgatctctgccatgaactgctcgatctcttcctcctggagatctcctcgtccggcgcgctccacggtggccgccaggtcgttggagatgcgacccatgagctgcgagaaggcgttgagcccgccctcgttccagacccggctgtagaccacgcccccctcggcgtcgcgggcgcgcatgaccacctgggccaggttgagctccacgtgtcgcgtgaagacggcgtagttgcgcaggcgctggaaaaggtagttcagggtggtggcggtgtgctcggcgacgaagaagtacatgacccagcgccgcaacgtggattcattgatgtcccccaaggcctccaggcgctccatggcctcgtagaagtccacggcgaagttgaaaaactgggagttgcgagcggacacggtcaactcctcctccagaagacggatgagctcggcgacagtgtcgcgcacctcgcgctcgaaggccacggggggcgcttcttcctcttccacctcttcttccatgatcgcttcttcttcttcctcagccgggacgggagggggcggcggcggcgggggaggggcgcggcggcggcggcggcgcaccgggaggcggtcgatgaagcgctcgatcatctccccccgcatgcggcgcatggtctcggtgacggcgcggccgttctcccgggggcgcagctcgaagacgccgcctctcatctcgccgcggggcgggcggccgtgaggtagcgagacggcgctgactatgcatcttaacaattgctgtgtaggtacgccgccgagggacctgattgagtccagatccaccggatccgaaaacctttggaggaaagcgtctatccagtcgcagtcgcaaggtaggctgagcaccgtggcgggcgggggcgggtctggagagttcctggcggagatgctgctgatgatgtaattaaagtaggcggtcttgagaaggcggatggtggacaggagcaccatgtctttgggtccggcctgttggatgcggaggcggtcggccatgccccaggcctcgttctgacaccggcgcaggtctttgtagtagtcttgcatgagtctttccaccggcacctcttctccttcctcttctccatctcgccggtggtttctcgcgccgcccatgcgcgtgaccccaaagcccctgagcggctgcagcagggccaggtcggcgaccacgcgctcggccaagatggcctgctgcacctgagtgagggtcctctcgaagtcatccatgtccacgaagcggtggtaggcgcccgtgttgatggtgtaggtgcagttggccatgacggaccagttgacggtctggtgtcccggctgcgagagctccgtgtaccgcaggcgcgagaaggcgcgggaatcgaacacgtagtcgttgcaagtccgcaccagatactggtagcccaccaggaagtgcggcggaggttggcgatagaggggccagcgctgggtggcgggggcgccgggcgccaggtcttccagcataaggcggtggtatccgtagatgtacctggacatccaggtgatgccggcggcggtggtggtggcgcgcgcgtagtcgcggacccggttccagatgtttcgcaggggcaagaagtgttccatggtcggcacgctctggccggtgaggcgcgcgcagtcgttgacgctctatacacacacaaaaacgaaagcgtttacagggctttcgttctgtagcctggaggaaagtaaatgggttgggttgcggtgtgccccggttcgagaccaagctgagctcggccggctgaagccgcagctaacgtggtattggcagtcccgtctcgacccaggccctgtatcctccaggatacggtcgagagcccttttgctttcttggccaagcgcccgtggcgcgatctgggatagatggtcgcgatgagaggacaaaagcggctcgcttccgtagtctggagaaacaatcgccagggttgcgttgcggcgtaccccggttcgagcccctatggcggcttggatcggccggaaccgcggctaacgagggccgtggcagccccgtcctcaggaccccgccagccgacttctccagttacgggagcgagccccttttgtttttttattttttagatgcatcccgtgctgcggcagatgcgcccctcgccccggcccgatcagcagcagcaacagcaggcatgcagacccccctctcccctttccgccccggtcaccacggccgcggcggccgtgtcgggcgcggggggcgcgctggagtcagatgagccaccgcggcggcgacctaggcagtatctggacttggaagagggcgagggactggcgcggctgggggcgaactctccagagcgccacccgcgggtgcagttgaaaagggacgcgcgcgaggcgtacctgccgcggcagaacctgtttcgcgaccgcgggggcgaggagcccgaggagatgcgagactgcaggttccaagcggggcgcgagctgcggcgcgggctggacagacagcgcctgctgcgcgaggaggactttgagcccgacacgcagacgggcatcagccccgcgcgcgcgcacgtagccgcggccgacctggtgaccgcctacgagcagacggtgaaccaggagcgcaacttccaaaagagcttcaacaaccacgtgcgcacgctggtggcgcgcgaggaggtgaccctgggtctcatgcatctgtgggacctggtggaggcgatcgtgcagaaccccagcagcaagcccctgaccgcgcagctgttcctggtggtgcagcacagcagggacaacgaggccttcagggaggcgctgctgaacatcaccgagccggaggggcgctggctcctggacctgataaacatcctgcagagcatagtggtgcaggagcgcagcctgagcctggccgagaaggtggcggccatcaactactctatgctgagcctgggcaagttctacgcccgcaagatctacaagaccccctacgtgcccatagacaaggaggtgaagatagacagcttctacatgcgcatggcgctgaaggtgctgaccctgagcgacgacctgggagtgtaccgcaacgagcgcatccacaaggccgtgagcgccagccggcggcgcgagctgagcgaccgcgagctgatgcacagtctgcagcgcgcgctgaccggcgcgggcgagggcgacagggaggtcgagtcctacttcgacatgggggccgacctgcactggcagccgagccgccgcgccctggaggcggcgggggcgtacggcggccccctggcggacgatgaccaggaagaggaggactatgagctagaggagggcgagtacctggaggactgacctggctggtggtgttttggtatagatgcaagatccgaacgtggcggacccggcggtccgggcggcgctgcagagccagccgtccggcattaactcctctgacgactgggccgcggccatgagtcgcatcatggccctgaccgcgcgcaaccccgaggctttcaggcagcagcctcaggccaaccggctggcggccatcttggaagcggtagtgcccgcgcgctccaaccccacccacgagaaggtgctggccatagtcaacgcgctggcggagagcagggccatccgcgcggacgaggccggactggtgtacgatgcgctgctgcagcgggtggcgcggtacaacagcggcaacgtgcagaccaacctggaccgcctggtgacggatgtgcgcgaggccgtggcgcagcgcgagcgcttgcatcaggacggtaacctgggctcgctggtggcgctaaacgccttcctcagcacccagccggccaacgtaccgcgggggcaggaggactacaccaactttttgagcgcgctgcggctgatggtgaccgaggtccctcagagcgaggtgtaccagtcggggcccgactacttcttccagaccagcagacagggcttgcaaaccgtgaacctgagccaggctttgaagaacctgcgggggctgtggggagtgaaggcgcccaccggcgaccgggctacggtgtccagcctgctaacccccaactcgcgcctgctgctgctgctgatcgcgcccttcacggacagcgggagcgtctcgcgggaaacctatctgggccacctgctgacgctgtaccgcgaggccatcgggcaggcgcaggtggacgagcacaccttccaagagatcaccagcgtgagccacgcgctggggcaggaggacacgggcagcctgcaggcgaccctgaactacctgctgaccaacaggcggcagaagattcccacgctgcacagcctgacgcaggaggaggagcgcatcttgcgctacgtgcagcagagcgtgagcctgaacctgatgcgcgacggcgtgacgcccagcgtggcgctggacatgaccgcgcgcaacatggaaccgggcatgtacgcctcccaccggccgttcattaaccgcctgatggactacttgcatcgggcggcggccgtgaaccccgagtacttcactaatgccattctgaatccccactggatgccccctccgggtttctacaacggggacttcgaggtgcccgaggttaacgacgggttcctctgggatgacatggatgacagtgtgttctcacccaacccgctgcgcgccgcgtctctgcgattgaaggagggttctgacagggaaggaccgaggagtctggcctcctccctggctctgggagcggtgggcgcggcggcgcggggcagtagccccttccccagcctggcagactctctgaacagcgggcgggtgagcaggccccgcttgctaggcgaggaggagtatctgaacaactccctgctgcagcccgcgagggacaaaaacgctcagcggcagcagtttcccaacaatgggatagagagcctggtggacaagatgtccagatggaagacgtatgcgcaggagtacaaggagtgggaggaccgccagccgcggcccctgccgccccctaggcagcgctggcagcggcgcgcgtccaaccgccgctggaggcaggggcccgaggacgatgatgactctgcagatgacagcagcgtgctggacctgggcgggagcgggaaccccttttcgcacctgcgcccccgcctgggcaagatgttttaaaagagaaaaaataaaaactcaccaaggccatggcgacgagcgttggttttttgttcccttccttagtatgcgacgcgcggcgatgttcgaggaggggcctcccccctcttacgagagcgcgatgggattttctcctgcgacgcccctacagcctccctacgtgcctcctcggtacctgcaacctaccgggggaagaaatagcatctgttactctgagctgcagcccctgtatgacaccaccaaagtgtacctggtggacaacaagtctgcggacgtggcctccctgaactaccagaacgaccacagcgattttttgaccaccgtgatccaaaacaatgacttcaccccaaacgaggccagcacccagaccataaacctggacaacaggtcgcactggggcggtgatctgaagaccatcttgcacaccaacatgcccaacgtgaatgagtttatgtttactaactcttttaaggcgcgggtaatggtggcgcgcgacgataagggagtgcctaaatacgagtgggtggactttacactgcccgagggcaactactccgagatcatgactcttgacctgatgaacaacgcgatcgtggagcactacttgaaagtaggcaggcagaacggggtaaaagaaagcgatattggagttaagtttgacaccaggaactttcgcctgggatgggaccccgagacggggttggttatgcccggggtttacactaatgaagcttttcaccccgatatagtgctcttgcccggatgcggggtggacttcacccaaagccggctgagcaacctgctgggcattcgaaagcgccagccattccaggaggggtttcaaatcacttatgagcatttggaagggggcaacattccggcgcttctggatttggtcgcctacgaggagagtttgaaatccgaggaaagcggggataacactgacaagggcggcgaggagcaagccggcgatggcgacactgcttcggtagaaaacgaaagtgcgtccgtggtggaggcggcggcggtagcgaccgcagagccggagaccgtagaggaggatatgaatgatagcgcaatcagaggagactcgtttattccccggggcgaagaaaagaaggcggaggctgcggcagcagtcgaagcagagcccaaagtcgagtcggagatcatggaggaggatttgaatgataacgcgatcagaggtgatacgtttgtgccgcggggcgaagaaaaaaaagcggaggcggaggccgcggctgaggaggcggccgaggctgtggcagccaccgcggcggtgactgaaacaactgaggagcaggttcaggccgagcaggttcaaaagaagcccgtgattaaagccctaacacaagatagcaaggagcgcagttacaacttgattcccggtagtactgacaccgagtaccgcagctggtacctggcatacaactacggcgacccggtcaaaggggtgcgctcgtggactctgctttgcacgccggacgtcacctgcggctccgagcagatgtactggtcgttgccaaacatgatgcaagacccggtgaccttccgctccacgcggcaggttaacaacttcccggtggtgggcgccgaactgctgcccgtgcactccaagagcttttacaacgagcaggccgtgtactcccagctgatccgccaggccacctctctgacccacgtgttcaatcgctttcccgagaaccagattttggcgcgcccgccggcccccaccatcactaccgtcagtgaaaacgttcctgctctcacagatcacgggacgctaccgctgcgcaacagcatctcaggagtccagcgagtgaccattactgacgccagacgccggacctgcccctacgtttacaaggccttgggcatagtctcgccgcgcgtcctctccagccgcactttttaaaacacatattcacccacgcttcaaagattatgtctatacttatctcacccagcaataacaccggctgggggctgcgcgcgcccagcaagatgtttggaggggcgagaaaacgttccgagcagcacccagtgcgcgtgcgcggccactaccgcgcgccctggggagcgcacaagcgcgggcgcgcagggcgcaccactgtggacgacgccattgactccgtagtggagcaggcgcgccactacacacccggcgcgccgtccgcccccgccgtgtccaccgtggacgaggcgatcgaaagcgtggtacagggcgcgcggcactatgccaaccttaaaaatcgccgccgtcgcgtggcccgccgccatcgccggagaccccgggccaccgccgccgcgcgccttgctaaggctctactcaggcgcgccaggcgaactggccgccgggccgccatgagggccgcacggcgggctgccgccagtgcggccgccgcggccccacgggcacgaaggcgcgcggccgctgccgccgccgccgccatttccagcttggcctcaacgcggcgcggtaacatatactgggtgcgcgactcgataaccggcacgcgggtacccgtgcgctttcgccccccgcggaattagcacaagacaacatacacactgagtctcctgctgttgtgtatcccagcggcgaccgtcagcagcggcgacatgtccaagcgcaaaattaaagaagagatgctccaggtcatcgcgccggagatctatgggcccccgaagaaggaggaggatgattacaagccccgcaagctaaagcgggtcaaaaagaaaaagaaagatgatgatgatgacgaggcggtggagtttgtccgccgcatggcacccaggcgccccgtgcagtggaagggtcggcgcgtgcagcgcgttttgcgccccggcaccgcggtggtcttcacgcccggcgagcgctccacgcgcactttcaagcgggtgtacgatgaggtgtacggcgacgaggacctgttggagcaggccaaccagcgctttggggagtttgcatatgggaaacggccccgcgagagtctaaaagaggacctgctggcgctaccgctggacgagggcaatcccaccccgagtctgaagccggtgaccctgcaacaggtgctgcctttgagcgcgcccagcgagcataagcgagggttgaagcgcgagggcggggacctggcgcccaccgtgcagttgatggtgcccaagcggcagaagctggaggacgtgctggagaaaatgaaagtagagcccgggatccagcccgagatcaaggtccgccccatcaagcaggtggcgcccggcgtgggagtccagaccgtggacgttaggattcccacggaggagatggaaacccaaaccgccactccctcttcagcggccagcgccaccaccggcaccgcttcggtagaggtgcagacggacccctggctacccgccgccgctgtcgccgccgccgccgccccccgttctcgcgggcgcaagagaaattatccagtggccagcgcgctcatgccccagtacgcactgcatccatccatcgcgcccacccccggctaccgcgggtattcgtaccgcccgcgcagatcggccggcactcgcggccgccgccgccgtgcgaccacaaccagccgccgccgtcgccgccgccgccagccagtgctgacccccgtgtctgtaaggaaggtggctcgctcggggagcacgctggtggtgcccagagcgcgctaccaccccagcatcgtttaaagccggtctctgtatggttcttgcagatatggccctcacttgtcgcctccgcttcccggtgccgggataccgaggaagaactcaccgccgcagaggcatggcgggcagcggtctccgcggcggccgtcgccatcgccggcgcgcaaaaagcaggcgcatgcgcggcggtgtgctgcctctgctaatcccgctaatcgccgcggcgatcggtgccgtacccgggatcgcctccgtggccctgcaggcgtcccagaaacgttgactcttgcaaccttgcaagcttgcatttttttggaggaaaaaataaaaaagtctagactctcacgctcgcttggtcctgtgactattttgtagaaaaaagatggaagacatcaactttgcgtcgctggccccgcgtcatggctcgcgcccgttcatgggagactggacagatatcggcaccagcagtatgagcggtggcgccttcagctggggcagtctgtggagcggccttaaaaattttggttccaccattaaaaactatggcaacaaagcgtggaacagcagcacgggccagatgctaagagacaagttgaaagagcagaacttccaggagaaggtggcgcagggcctggcctctggcatcagcggggtggtggacatagctaaccaggccgtgcagaaaaagataaacagtcatctggacccccgccctcaggtggaggaaacgcctccagccatggagacggtgtttcccgagggcaaaggcgaaaagcgcccgcggcccgacagggaagagaccctggtgtcacacaccgaggagccgccctcttacgaggaggcactcaaggccggcctgcccaccactcgccccgtagctcccatggccacaggtgtggtgggccataaacaacacacccccgcaacactagatctgcccccgccgtccgagccgccgcgtcagccaaagacggcgacggtgcccgctccctccacttccgccgccaacagagtgtccctgcgccgcactacgggcgcccctcggggaccgcgactgagcggcaactggcagagcacactgaacagcattgtgggcctgggagtgaaaagtgtgaagcgccgccgttgctactgaatgagcaagctagctaacgtgttatatgtgtgtatgcgtcctatgtcgccgccagaggagctgttgagccgcccgcgccgtctgcactccagcgaatttcaagatggcgaccccttcgatgatgccacagtggtcgtacatgcacatctcgggccaggacgcctcggagtacctgagccccgggctggtgcagttcgcccgcgccaccgacagctacttcagcctaagtaacaaatttaggaaccctacggtggcacccacccacgatgtgaccacggaccggtcgcagcgcctgacgctgcggtttatccccgtggatcgggaggacactgcctactcttacaaggcgcgcttcacgctagccgtgggcgacaaccgcgtgctggacatggcctccacctactttgatatccggggtgtgctggacaggggtcccacctttaagccctactcgggcactgcctacaactccctggctcctaaaggcgctcccaattcttgcgagtgggatgaaaaaactaatactgctgaagcagccattgaaaatgaagaagagctggcggatgagccagaagagcaagcagaagaggctataaaaaccaatgtgtttgcccaggcgccatattctggcaatgcaatttccaaagaaggaatacaagtaggcatagaaggcattggagagcaagtaaaagccgtatacgcagacaaaacctaccagccggaacctcaggttggagaaactcaatggaatgagactgaaataaatcatggagcaggaagggtgctgaagaagaccactcccatgaagccttgctatggttcttatgctaaacctactaatgaatatggaggccagggcatccttgtagaaaaaaatggcaaaatggaaagccaggtggaaacacagttttttgctcttgacggtgaaaatgataatagtccaaaagtggtgttgtatagcgaagatgtaaacttggatactcctgacacacacctatcatacaaacctagcgcccaagatgtaaactctaaagaaatgttgggccaacaggccatgcccaacaggccaaatcttattgcttttagggacaactttattggacttatgtactacaacagcactggcaacatgggagtgctggcaggacaggcctcccaactaaatgccgtggtagacttgcaagacagaaacacagagttgtcataccagctgatgcttgattccattggagacagatcaagatattttgccatgtggaaccaggcggttgatagttacgatccagatgttagaattattgaaaaccatggcacagaggatgaacttccaaactactgttttcctttgggaggaatatttaatactcagagttttaaaaaggtaaaacctggaacggataacggatgggaaacagatgatgacttttcagataaaaatgaaataagagttggcaacaactttgccatggagatcaatatccaggcaaacctgtggagaagcttcttgtattccaatgtggctctctacctgccagataagatgaagtactctccaaccaacatagacatttccaccaacactaacacctatgactacatgaacaaaagagtggcgcctccaggcctggtggactgctatgtcaatctgggggccaggtggtcccttgatgtaatggataacatgaacccctttaaccaccaccgcaatgcgggcctgcgataccgttccatgcttctgggtaacggccgctacgtgcccttccacatccaggtgccccaaaagttctttgccatcaaaagccttctactcttgcctggctcgtacacctacgaatggaatttcagaaaggatgtgaacatggtcctacagagctctctgggcaacgaccttagggtggatggggccagcatcaagtttgacagcatcaccctttatgctacctttttccccatggcccacaacaccgcttccacgcttgaggccatgctcagaaacgacaccaacgaccagtccttcaatgactacctctctggggccaacatgctctaccccatccccgccaacgctaccaacgtgcccatctccattccctctcgcaactgggccgccttcagaggctgggcatttacccgccttaagaccaaggagaccccctccctgggctcgggttttgacccctactttgtctactcgggatccatcccctacctggatggcaccttctacctcaaccacacttttaagaagatatccatcatgtatgactcctctgtcagctggccgggcaacgaccgcctgctcacccccaatgagttcgaggtcaagcgcgccgtggacggcgagggctacaacgtggcccagtgcaacatgaccaaggactggttcctggtgcagatgctggccaactacaacataggctaccagggcttctacatcccagagagctacaaggacaggatgtactccttcttcagaaatttccaacccatgagcaggcaggtggtggacgagaccaaatacaaggactatcaggccgttggcatcactcaccagcacaacaactcgggattcgtgggctacctggcacccaccatgcgcgagggacaggcctaccccgccaacttcccctaccccttgataggcaagaccgcggtcgacagcgtcacccagaaaaagttcctctgcgaccgcaccctctggcgcatccccttttctagcaacttcatgtccatgggcgcgctcacggacctgggccagaacctgctctatgccaactccgcccatgcgctggacatgacttttgaggtggaccccatggacgagcccacccttctctatattgtgtttgaagtgttcgacgtggtcagagtgcaccagccgcaccgcggtgtcatcgagaccgtgtacctgcgcacgcccttctcggccggcaacgccaccacctaaggagacagcgccgccgcctgcatgacgggttccaccgagcaagagctcagggccatcgccagagacctgggatgcggaccctattttttgggcacctatgacaaacgcttcccgggcttcatctcccgagacaagctcgcctgcgccatcgtcaacacggccgcgcgcgagaccgggggcgtgcactggctggcctttggctgggacccgcgctccaaaacttgctacctctttgacccttttggcttctccgatcagcgcctcaagcagatctatgagtttgagtacgaggggctgctgcgccgcagcgcgcttgcctcctcgcccgaccgctgcatcacccttgagaagtccaccgagaccgtgcaggggccccactcggccgcctgcggtctcttctgctgcatgtttttgcacgcctttgtgcgctggccccagagtcccatggatcgcaaccccaccatgaacttgctcaagggagtgcccaacgccatgctccagagcccccaggtccagcccaccctgcgccacaaccaggaacagctctaccgcttcctggagcgccactccccctacttccgcagtcacagcgcgcgcatccggggggccacctctttctgccacttgcaagaaaacatgcaagacggaaaatgatgtacagctcgctttttaataaatgtaaagactgtgcactttatttatacacgggctctttctggttatttattcaacaccgccgtcgccatctagaaatcgaaagggttctgccgcgcgtcgccgtgcgccacgggcagagacacgttgcgatactggaagcggctcgcccacttgaactcgggcaccaccatgcggggcagtggttcctcggggaagttctcgccccacagggtgcgggtcagctgcagcgcgctcaggaggtcgggagccgagatcttgaagtcgcagttggggccggaaccctgcgcgcgcgagttgcggtacacggggttgcagcactggaacaccagcagggccggattatgcacgctggccagcaggctctcgtcgctgatcatgtcgctgtccagatcctccgcgttgctcagggcgaatggggtcatcttgcagacctgcctgcccaggaaaggcggcagcccgggcttgccgttgcagtcgcagcgcaggggcatcagcaggtgcccgcggcccgactgcgcctgcgggtacagcgcgcgcatgaaggcttcgatctgcctgaaagccacctgcgccttggctccctccgaaaagaacatcccacaggacttgctggagaactggttcgcgggacagctggcatcgtgcaggcagcagcgcgcgtcggtgttggcgatctgcaccacgttgcgaccccaccggttcttcactatcttggccttggaagcctgctccttcagcgcgcgctggccgttctcgctggtcacatccatctctatcacctgctccttgttgatcatgtttgtcccgtgcagacacttcaggtcgccctccgtctgggtgcagcggtgctcccacagcgcgcaaccggtgggctcccaattcttgtgggtcacccccgcgtaggcctgcaggtaggcctgcaagaagcgccccatcatggccacgaaggtcttctggctcgtaaaggtcagctgcaggccgcgatgctcttcgttcagccaggtcttgcagatggcggccagcgcctcggtctgctcgggcagcatcctaaaatttgtcttcaggtcgttatccacgtggtacttgtccatcatggcgcgcgccgcctccatgcccttctcccaggcggacaccatgggcaggcttagggggtttatcacttccaccggcgaggacaccgtactttcgatttcttcttcctccccctcttcccggcgcgcgcccacgctgctgcgcgctctcaccgcctgcaccaaggggtcgtcttcaggcaagcgccgcaccgagcgcttgccgcccttgacctgcttaatcagcaccggcgggttgctgaagcccaccatggtcagcgccgcctgctcttcttcgtcttcgctgtctaccactatctctggggaagggcttctccgctctgcggcggtgcgcttcttttttttcttgggagcagccgtgacggagtccgccacggcgacggaggtcgagggcgtggggctgggggtgcgcggtaccagggcctcgtcgccctcggactcttcctctgactccaggcggcggcggagtcgcttctttgggggcgcgcgcgtcagcggcggcggagacggggacggggacggggacgggacgccctccacagggggtggtcttcgcgcagacccgcggccgcgctcgggggtcctctcgagctggtcttggtctcgactggccattgtatcctcctcctcctaggcagagagacataaggagtctatcatgcaagtcgagaaggaggagagcttaaccaccccctctgacaccgccgatgcgcccgccgtcgccgtcgcccccgctgccgccgacgcgcccgccacaccgagcgacacccccgcggacccccccgccgacgcacccctgttcgaggaagcggccgtggagcaggacccgggctttgtctcggcagaggaggatttgcgagaggaggagaataaggagaagaagccctcagtgccaaaagatgataaagagcaagacgagcacgacgcagatgcacaccagggtgaagtcgggcggggggacggagggcatggcggcgccgactacctagacgaagggaacgacgtgctcttgaagcacctgcatcgtcagtgcgccatcgtttgcgacgctctgcaggagcgcagcgaagtgcccctcagcgtggcggaggtcagccacgcctacgagctcagcctcttctccccccgggtgcccccccgccgccgcgaaaacggcacatgcgagcccaacccgcgcctcaacttctaccccgccttcgtggtgcccgaggtcctggccacctatcacatcttctttcaaaattgcaagatccccctctcgtgccgcgccaaccgtagccgcgccgataagatgctggccctgcgccagggcgaccacatacctgatatcgccgctttggaagatgtgccaaagatctttgagggtctgggtcgcaacgagaagcgggcagcaaactctctgcaacaggaaaacagcgaaaatgagagtcacaccggggtactggtggagctcgagggcgacaacgcccgcctggcggtggtcaagcgcagcatcgaggtcacccactttgcctaccccgcgctaaacctgccccccaaagtcatgaacgcggccatggacgggctgatcatgcgccgcggccggcccctcgctccagatgcaaacttgcatgaggagaccgaggacggccagcccgtggtcagcgacgagcagctggcgcgctggctggagaccgcggaccccgccgaactggaggagcggcgcaagatgatgatggccgcggtgctggtcaccgtagagctggagtgtctgcagcgcttcttcggcgaccccgagatgcagagaaaggtcgaggagaccctgcactacaccttccgccagggctacgtgcgccaggcttgcaagatctccaacgtggagctcagcaacctggtgtcctacctgggcatcttgcatgagaaccgcctcgggcagagcgtgctgcactccaccctgcgcggggaggcgcgccgcgactacgtgcgcgactgcgtttacctcttcctctgctacacctggcagacggccatgggggtctggcagcagtgtctggaggagcgcaacctcaaagagctggagaagctcctgcagcgcgcgctcaaagacctctggacgggctacaacgagcgctcggtggccgccgcgctggccgacctcatcttccccgagcgcctgctcaaaaccctccagcaggggctgcccgacttcaccagccaaagcatgttgcaaaacttcaggaactttatcctggagcgttctggcatcctacccgccacctgctgcgccctgcccagcgactttgtccccctcgtgtaccgcgagtgccccccgccgctgtggggtcactgctacctgttccaactggccaactacctgtcctaccacgcggacctcatggaggactccagcggcgaggggctcatggagtgccactgccgctgcaacctctgcacgccccaccgctccctggtctgcaacacccaactgctcagcgagagtcagattatcggtaccttcgagctacagggtccgtcctcctcagacgagaagtccgcggctccggggctaaaactcactccggggctgtggacttccgcctacctgcgcaaatttgtacctgaagactaccacgcccacgagatcaggttttacgaggaccaatcccgcccgcccaaggcggagctgaccgcctgcgtcatcacccagggcgagatcctaggccaattgcaagccatccaaaaagcccgccaagattttttgctgaagaagggtcggggggtgtatctggacccccagtcgggtgaggagctcaacccggttcccccgctgccgccgccgcgggaccttgcttcccaggataagcatcgccatggctcccagaaagaagcagcagcggccgccactgccgccaccccacatgctggaggaagaggaggaatactgggacagtcaggcagaggaggtttcggacgaggaggagccggagacggagatggaagagtgggaggaggacagcttagacgaggaggcttccgaagccgaagaggcagacgcaacaccgtcaccctcggccgcagccccctcgcaggcgcccccgaagtccgctcccagcatcagcagcaacagcagcgctataacctccgctcctccaccgccgcgacccacggccgaccgcagacccaaccgtagatgggacaccaccggaaccggggccggtaagtcctccgggagaggcaagcaagcgcagcgccaaggctaccgctcgtggcgcgctcacaagaacgccatagtcgcttgcttgcaagactgcggggggaacatctccttcgcccgccgcttcctgctcttccaccacggtgtggccttcccccgtaacgtcctgcattactaccgtcatctctacagcccctactgcggcggcagtgagccagagacggtcggcggcggcggcgcccgtttcggcgcctaggaagacccagggcaagacttcagccaagaaactcgcggcggccgcggcgaacgcggtcgcgggggccctgcgcctgacggtgaacgaacccctgtcgacccgcgaactgaggaaccgaatcttccccactctctatgccatcttccagcagagcagagggcaggatcaggaactgaaagtaaaaaacaggtctctgcgctccctcacccgcagctgtctgtatcacaagagcgaagaccagcttcggcgcacgctggaggacgctgaggcactcttcagcaaatactgcgcgctcactcttaaggactagctccgcgcccttctcgaatttaggcgggaacgcctacgtcatcgcagcgccgccgtcatgagcaaggacattcccacgccatacatgtggagctatcagccgcagatgggactcgcggcgggcgcctcccaagactactccacccgcatgaactggctcagtgccggcccacacatgatctcacaggttaatgatatccgcacccatcgaaaccaaatattggtggagcaggcggcgattaccaccacgccccgcaataatcccaaccccagggagtggcccgcgtccctggtgtatcaggaaattcccggccccaccaccgtactacttccgcgtgattcccaggccgaagtccaaatgactaactcaggggcgcagctcgcgggcggctgtcgtcacagggtgcggccccctcgccagggtataactcacctggagatccgaggcagaggtattcagctcaacgacgagtcggtgagctcctcgctcggtctcagacctgacgggaccttccagatagccggagccggccgatcttccttcacgccccgccaggcgtacctgactctgcagagctcgtcctcggcgccgcgctcgggcggcatcgggactctccagttcgtgcaggagtttgtgccctcggtctacttcaaccccttctccggctctcccggtcgctacccggaccagttcatctcgaactttgacgccgcgagggactcggtggacggctacgactgaatgtcgggtggacccggtgcagagcaacttcgcctgaagcacctcgaccactgccgccgccctcagtgctttgcccgctgtcagaccggtgagttccagtacttttccctgcccgactcgcacccggacggcccggcgcacggggtgcgctttttcatcccgagtcaggtgcgctctaccctaatcagggagtttaccgcccgtcccctactggcggagttggaaaaggggccttctatcctaaccattgcctgcatctgctctaaccctggattgcaccaagatctttgctgtcatttgtgtgctgagtataataaaggctgagatcagaatctactcgggctcctgtcgccatcctgtcaacgccaccgtccaagcccggcccgatcagcccgaggtgaacctcacctgcggtctgcaccggcgcctgagaaaatacctagcttggtactacaacagcactccctttgtggtttacaacagctttgaccaggacggggtctcactgagggataacctctcgaacctgagctactccatcaggaagaacagcaccctcgagctacttcctccttacctgcccgggacttaccagtgtgtcaccggtccctgcacccacacccacctgttgatcgtaaacgactctcttccgagaacagacctcaataactcctcttcgcagttccccagaacaggaggtgagctcaggaaaccccgggtaaagaagggtggacaagagttaacacttgtggggtttctggtgtatgtgacgctggtggtggctcttttgattaaggcttttccttccatgtctgaactctccctcttcttttatgaacaactcgactagtgctaacgggaccctacccaacgaatcgggattgaatatcggtaaccaggttgcagtttcacttttgattaccttcatagtcctcttcctgctagtgctgtcgcttctgtgcctgcggatcgggggctgctgcatccacgtttatatctggtgctggctgtttagaaggttcggagaccatcgcaggtagaataaacatgctgctgcttaccctctttgtcctggcgctggccgccagctgccaagccttttccgaggctgattttatagaaccccagtgcaatatcacttataaatctgaatataacctctgcactatcctaattaaatgcgttactcaacacgatgaggtaactgttagatacaaagatcaatcaaaaagagacgcactttacagcagctggcaaccaggagatgaacaaaaatacaatgtgaccgtcttccagggcaaactctccaaaacttacaattacactttcccattcgaggagatgtgtgagtttgtcatgttcatgtcaaagcagtacaagatgtggcctccgactccccagggctgtgtggaaaatccaggctctttctgcatgatctctctctgtgtaactgtgctggcactaatactcacgcttttgtatatcagatttaaatcaaggcaaagcttcatcgatgaaaagaaaatgccttaatcgcttttcacgcttgattgctaacaccgggtttttatccgcagaatgattggaatcaccctactaatcacctccctccttgcgattgcccatgggttggaacgaatcgaagtccctgtgggggccaatgttaccctggtggggcctgtcggcaatgctacattaatgtgggaaaaatatactaaaaatcaatgggtctcttactgcactaacaaaaacagccacaagcccagagccatctgcgatgggcaaaatttaaccttgattgatgttcaattgctggatgcgggctactattatgggcagctgggtacaatcgttaattactggagaccccacaaagattacatgcttcacgtagtaaagggtccccttagcagcccgaccactaccaccacctctaccacacccactaccaccactactcccatcaccagcactgccacccagcctcctcatagcagaacaaccacttttatcaattccaagtcccactccccccacattgccggcgggccctccgcctcaaactccgagaccaccgagatctgcttctgcaaatgctctgacgccattgcccaggatttggaagaccacgaggaagatgagcatgacttcgcagatgcatgccaggcatcaggggcagaagcactgccggtggccctcaaacagtatgcagactcccataccacccccgatcttccaccgccttcccagaagccaagtttcctgggggaaaatgaaacactgcctctctccatacttgctttgacatctgttgctattctgactgctctgctggtgctcctatgctctatatgctacctgatctgctgcaggaagaaaaaatctcacggccatgctcaccagccgcttatgcacttcccttaccctccagagttgggcgaccacaaactttaagtctgcagtagctatctgcccatcccttgtcagtcgacagcgatgagccccactaatctaacggcctctggacttacaacattgtctcttaatgagaccaccgctcctcaagacctgtacgatggtgtctccgcgctggttaaccagtgggatcacctgggcatatggtggctcctcataggagcagtgaccctgtgcctaatcctggtctggataatctgctgcatcaaaagcagaagacccaggcggcggcccatctacaggcccttcgtcatcacacctgaagatgatgatggcaccacgtccaggctgcagagcctaaagcagctactcttctcttttacagcatggtaaattgaacatgcctcgcattttcatctacttgtttcttcttccactctttttgggctcttctacattggcagctgtgtcccacatcgaggtagactgcatctcgcccttctcagtctacttactcttcggctttgtcatttgcaactttgtctgcagcgttatcactgtagtgatctgcttcatacagtgcatcgactacgtctgcgtacgggtggcctattttagacaccacccccagtatcgcaacagggacatagcggctctcctaagacttgtttaaatcatgcccaaattaactgtgattgctcttctgattatctgctgcgtcctagccgcgattgggactcagcctactaccaccaccaccagcgctcccagaaagagacatgtttcctgcagcttcaaacgtccctggaatataccccaatgctttactgatgaacctgaaatctctttggcttggtacttcagcgtcaccgcccttctcatcttctgcagtacggttattgcccttgccatttacccttcccttgacctgggctggaatgctgtcaactctatggaatatcccaccttcccagaaccagacctgccagacctggttgttctaaacgcgtttcctcctcctcccgttcaaaatcagtttcgccctccgtccccgacgcccactgaggtcagctactttaatctaacaggcggagatgactgaaaacctagacctagaaatggacggcctctgcagcgaacaacgcatactagagaggcgccggcaaaaagcagagctcgagcgtcttaaacaagagctccaagacgcggtggccatacaccagtgcaaaaaaggtgtcttctgtctagtgaaacaggccacgctcacctatgaaaaaacaggtgacacccaccgcctaggatacaagctgcccacacaacgccagaagttcgcccttatgataggcgaacaacccatcaccgtcacccagcactctgtggagacagaaggctgcatacacgctccctgcaggggcgctgactgtctctacaccttgatcaaaaccctctgcggccttagagacctcatccctttcaattgatcataactgtaatcaataaaaaatcacttacttgaaatctgatagcaagcctctgtccaattttttcagcaacacttccttcccctcctcccaactctggtactctaggcgcctcctagctgcaaacttcctccacagtctgaagggaatgtcagattcctcctcctgtccctccgcacccacgatcttcatgttgttgcagatgaaacgcgcgagatcgtctgacgagaccttcaaccccgtgtacccctacgataccgagatcgctccgacttctgtcccttttcccacccctccctttgtgtcccccgcaggaatgcaagaaaacccccctggagtgctatccctacgccttgcagaacccttgaccacctccaatggagcgctgaccctaaaaatggggggtggtttgaccctggacgaagaaggaaagcttacttcccaaaatattaccagtgttgatcctcctcttaaaaaaacaaaaaacaatatcagtctgcagactgcctccccccttgccgtcagctcgggagccctcacacttttcgctactcctcccctggcagttaatgacaataacctaactgtgcagtctcaggctccccttacactggaaaactcaaaactaagtctggccaccaaaggccccctaaccgtttctgaaggaaaacttgccctagaaacagaggctcccttgcatgcaagcgacagcagtagcctaggccttagtgtaacggccccactgagcattagcagcgacagcctaggactagacttgcaagcgcccattatttctgaaaatggaaaactgggcctaagagtaacaggtcccctaactgtggccagcagtattgatgctttgacagtagccacaggcagcggtattggacttgatagcaacacgcgcctacaggcaaaattggtcgcgcccctaggctttgacaccaatggcaacattaagctcagcacttcgggcggcatgagactgaacaatggcacacttatactagatgtaaactacccatttgaggctcaaggtcaacttagtctaagagtgggttcgggtccactgtatgtagactccaacacacataacctaaccgctagatgccttagagggctatacataacgtcatctaataaccaaaccggcctggaggccaacataaaacttacaaaaggacttgtgtttgatggaaatgccatagcagttaatgttagcaaagggctagaatacagtaccactgaaacagcgcagggtgtaaatcccatacagactaaaataggtttgggcatggaatatgataccaatggagccataaagccaagactaggctctggtttgagctttgataattcaggagctattgtagtgggaaacaaaaatgatgacactcttactctgtggactacaccagacccatctcccaactgtcagattaactcggaaaaagatgctaaactaaccttggtactaaccaagtgcggtagtcaaattgtaggcacagtatctgcctttgctcttaaaggcagccttgccccaattaatggcacagtgagctcagttagtatattcctaagatttaatgaaaatggggtactgatgagcaactcatcgttggaaagccaatactggaattacaggaatggaaattcaactaatgccacaccatatacaaatgcactaggttttatgcctaacctggcagcttatcccaaaggccaggcaacgactgcaaaaagcagcatcattagccaggtttacatgaatggtgacacttccaaacctatgatatttacaataacttttaatgggcttgaaacagaggaaactcaggtcagtacatattccatgacattttcatggaggtggacaaatggagactacgtggggcactattttaaaacaaactcctttactttctcctacattgcccaagaataaagaaagcacagagatgcttgtttttgatttcaaaattgtgtgcttttatttatttcaagcttacagtatttccagtagtcattcgaatagagcttaattaaactgcatgagaacccttccacatagcttaaattagcaccagtgcaaatggagaaaaatcaacatacctttttatccagatatcagagaactctagtggtcagttttcccccaccctcccagctcacagaatacacagtcctttccccccggctggctttaaacaacactatctcattggtaacagacatattcttaggtgtaataatccacacggtctcttggcgggccaaacgctggtcggtgatgttaataaactccccaggcagctctttcaagttcacgtcgctgtccaactgctgaagcgctcgcggctccgactgcgcctctagcggaggcaacggcaacacccgatccttgatctataaaggagtagagtcataatcccccataagaatagggcggtgatgcagcaacaaggcgcgcagcaactcctgccgccgcctctccgtacggcaggaatgcaacggcgtggtggtctcctccgcgataatccgcaccgctcgcagcatcagcatcctcgtcctccgggcacagcagcgcatcctgatctcactgagatcggcgcagtaagtgcagcacaaaaccaagatgttatttaagatcccacagtgcaaagcgctgtacccaaagctcatggcgggaaggacagcccccacgtgaccatcataccagatcctcaggtaaatcaaatgacgacctctcataaacacgctggacatgtacatcacctccttgggcatgtgctgattcaccacctctcgataccacaagcatcgctgattaattaaagacccctcgagcaccatcctgaaccaggaagccagcacctgaccccccgccaggcactgcagggaccccggtgaatcgcagtggcagtgaagactccagcgctcgtagccgtgaaccatagagctggtcattatatccaaattggcacaacacagacacactttcatacactttttcatgattagcagctcctctctagtcaggaccatatcccaaggaatcacccactcttgaatcaaggtaaatcccacacagcagggcaggcctctcacataactcacgttatgcatagtgagcgtgtcgcaatctggaaataccggatgatcttccatcaccgaagcccgggtctccgtctcaaagggaggtaaacggtccctcgtgtagggacagtggcgggataatcgagatcgtgttgaacgtagagtcatgccaaagggaacagcggacgtactcatatttcctccagcagaaccaagtgcgcgcgtggcagctatccctgcgtcttctgtctcgccgcctgccccgttcggtgtagtagttgtaatacagccactccctgagaccgtcaaggcgctccctggcgtccggatctatgacaacaccgtcctgcagcgccgccctgatgacatccaccaccgtagagtatgccaagcccagccaggaaatgcattcactttgacagcgagagataggaggagcggggagagatggaagaaccatgatagtaaagagaacttttattccaatcgatcttctaagatatcaaagtggagatctataagatgacactggtctcctccgctgagtcgatcaaaaataacagctaaaccacaaacaacacgattggtcaaatgctccacaagggcctgcagcataaaattgcctcggaactccaccgcaagcataacatcaaagccaccgcctctatcgtgatcaagaataaaaaccccacagctatccaccagacccatatagttttcatctctccatcgtgaaaaaagatttacaagctcctcctttaaatcacctccaaccaattgaaaaagttgaaccagaccgccctccaccttcattttcagcaagcgtatcatgattgcaaaaattcaggctcctcagacacctgtataagattgagaagcggaacgttaacatcgatgtttcgctcgcgtaaatcacgcctcagtgcaagcataatataatcccacaggtcggagcggatcagcgaggacacctccccgccaggaaccaactcaacggagcctatgctgattataatacgcatattcggagctatgctaaccagcacggcccccaaataggcgtactgcataggcggcgacaaaaagtgaacagtttgggttaaaaaatcaggcaaacactcgcgcaaaaaagcaagaacatcataaccatgctcatgcaaatagatgcaagtaagctcaggaacgaccacagaaaaatgcacaatttttctctcaaacatgactgcgagccctgcaaaaaataaaaaagaaacattacacaagagtagcctgtcttacgatgggatagactactctaaccaacataagacgggccacaacatcgcccgcgtggccataaaaaaaattgtccgtgtgattaaaaagaagcacagatagctggccagtcatatccggagtcatcacgtgtgaacccgtgtagacccccgggttggacacatcggccaaagaaagaaagcggccaatgtacccaggaggaattataacactaagacgaagatacaacagaataaccccatgagggggaataacaaagttagtaggtgaataaaaacgataaacacccgaaactccctcctgcgtaggcaaaatagcaccctccccttccaaaacaacatatagcgcttccacagcagccatgacaaaagactcaaaacactcaaaagactcagtcttaccaggaaaataaaagcactctcacagcaccagcactaatcagagtgtgaaaagggccaagtgccgaacgagtatatataggaataaaaaatgacgtaaatgtgtaaaggtcagaaaacgcccagaaaaatacacagaccaacgcccgaaacgaaaacccgcgaaaaaatacccagaacttcctcaacaaccgccacttccgctttctcacgatacgtcacttccgcaagaaaagcaaaactacatttcccacatgtgtaaaaacgaaaccccgccccttctaaccgcccacaacttacatcatcaaaacgtaaagtcctacgtcacccgccccgcctctccccgcccacctcattatcatattggccacaatccaaaataaggtatattat

SEQ ID NO: 59 - DNA, 83 bp, Gorilla beringei graueri
ggcgcggcctctcgcgcgtctgctcgggatgagaaactgaccgctctgctgcttaaactggaagacttgacccgggagctggc

SEQ ID NO: 60 - DNA, 100 bp, Gorilla beringei graueri
gcttcgtcagggactcggtgggcttgcaagaagcaagcttcaacgtcttccagcggcccaccatctcctccaactcccatgccatcttcaggcagatcgc

SEQ ID NO: 61 - DNA, 45 bp, Gorilla beringei graueri
gaggagggcgcacaggagggcgcgcagaaggacatgaacgatggg

SEQ ID NO: 62 - DNA, 111 bp, Gorilla beringei graueri
tccctggcccccaagggcgctcccaattcttgcgagtgggaacaagaggaaaatcaggtggtcgctgcagatgatgaacttgaagatgaagaagcgcaagctcaagaggac

SEQ ID NO: 63 - DNA, 38 bp, Gorilla beringei graueri
tcgagggtatcaatgctttggcagtagccacaggtaag

SEQ ID NO: 64 - DNA, 399 bp, Gorilla beringei graueri; identical to SEQ ID NO: 32

SEQ ID NO: 65 - DNA, 3168 bp, Gorilla beringei graueri
atggacagctccaatgtgcgcgatgtcgtcatcaaactccgcccgccgagcgccgagatctggacctgcggctctcgcggcgtggtggtctgctccaccatcgccctccaggagacagatgctggcggccagacaaccaaagtagaagaccaccagccacacgggaccccaggcgggggacttagattcccgctgcgcttcctcgtcagaggtcgccaggttcacctcgtgcaagatatacaacccgtgcagcgctgccagtactgcggtcgcttttacaaaagccagcacgagtgctcggcccgcagacgggacttctactttcaccacatcaacagccaatcctccaactggtggcgggagatccagttcttcccgatcggctctcatcctcgcacggagcgcctctttgtcacctacgatgtagagacctacacttggatgggagcctttggcaagcagctcgtgcccttcatgctggtcatgaaactggggggcaacgaggctctggtcgccgccgcgcgcgacctcgcccgagagctcagatgggacccctgggagaaagaccccctcaccttctactgcatcacccccgaaaagatggccgtggggcgacagttcagaaccttccgcgaccgcctgcagaccctcatggcccgcgacctctggcgatccttcctggcggccaaccctcacttgcaagactgggccctggaggagcacggcctggaatcgcccgaggagctcacctacgaggaactcaaaaagctcccctccatcaagggccagccccgctttttggagctctacatcgtgggccacaacataaacggctttgacgagatcgtcctggccgcccaggtcatcaacaaccgctcctcggtcccagggccctttcgcatcaccagaaacttcatgcctcgagcggggaagatcctcttcaatgacctcaccttctccctgcccaacccgcgctccaaaaagcgcacggactacaccctgtgggaacagggcggctgcgatgacacagacttcaaacatcaatacctcaaagtcatggtcagggacactttcgccctcacccacacctccctccgcaaggcggcgcaggcctacgcgctgcccgtggagaagggctgttgcccctaccaggccgtcaaccagttctacatgctaggctcttaccgttcggacacggacgggtttcccctccaagagtactggaaagaccgcgaagagttcgtcctcaaccgcgagctgtggaaaaagaagggggaggataagtatgacatcatccgcgagaccctcgactactgcgcgctcgacgtccaggtcaccgccgagctggtgcacaagctgcgcgagtcctacgcctgcttcgtcagggactcggtgggcttgcaagaagcaagcttcaacgtcttccagcggcccaccatctcctccaactcccatgccatcttcaggcagatcgccttccgcgccgagcgcccccagcgcaccaacctcgggcccaacatgctggccccctcccacgagctctatgactacgtgcgcgccagcatccgcggggggcgctgctaccccacctacctcggcatcctcagggaacccctgtacgtgtatgacatctgcggcatgtacgcctccgcgctcacccaccccatgccctggggcccgcccctcaacccctacgagcgcgcgctcgccgcccgcgaatggcagcgggctctggacatgcaagcttgcaagatcgactactttgacccgcgcttgctccccggggtcttcaccatcgacgcggaccccccaaacgaggaccagctggaccccctaccccccttctgctcgcgcaagggcggccgcctctgctggaccaacgagcgcctgcgcggcgaggtcgccaccagcgtcgacatggtcaccctgcacaaccgaggctggagggtgcgcctgatcccagacgagcgcaccaccgtcttccccgagtggaagtgcgtggcccgcgagtacgtgcaactcaacatcgcggccaaggagcgagccgaccgcgacaaaaaccagaccctgcgctccatcgccaagctgctctccaacgccctctacgggtcgttcgccaccaagcttgacaacaaaaaaatagtgttttctgaccagatggacccaggtaccctcaaaggtatcacctccggacaggtgaacatcaaatcctcctcatttttagaaactgacaacctgagcgctgaggtcatgcccgccttcgagagggaatacttaccccagcagctggctctcgcagacagcgatgcggaagagagtgaagatgaaagggtgcccacccccttttatacccccccgtcgggaacccccggtcacgtgtcctacacctacaagccaatcacttttctggacgcggaggagggggacatgtgcctgcacaccctggagaaggtggacccgctagtggacaacgaccgctacccctcccacgtggcctccttcgtcctggcctggacgcgggccttcgtctcagagtggtcagagtttctctacgaggaggacagaggcactccgctggaagacaggcccctgaagtcggtctacggagacacggacagcctcttcgtcaccgagaagggacaccgcctcatggagagccgaggtaagaaacgcatcaaaaagcatgggggcaacctggtttttgaccctgaccgcccggagctcacttggctggtggaatgcgagacggtctgcgcttcctgcggcgcggacgcctactccccagagtccgtgtttctcgctcccaagctctacgccctgaagagcctgcagtgcccctcgtgcggcgccacctccaagggaaagctccgcgccaaggggcacgccgccgagggtctcgactacgagaccatggtcaaatgctacctggccgacgcgcagggcgaagagcggcagcgattcagcaccagcagaaccagcctcaagcgcaccctggccagcgcccaacccggagcgcaccccttcaccgtgacccagaccaccctgacgaggaccctgcgcccatggaaggacatgactctggccccgctggacgcccatcggctggtgccctacagcgaaagccgccccaacccgcgaaacgaggagatctgctggatcgagatgccg

SEQ ID NO: 66 - DNA, 1974 bp, Gorilla beringei graueri
atgcggcgcgcggcgatgttcgaggaggggcctcccccctcttacgagagcgcgatggggatttctcctgcggcgcccctgcagcctccctacgtgcctcctcggtacctgcaacctacaggggggagaaatagcatctgttactctgagctgcagcccctgtacgataccaccagactgtacctggtggacaacaagtccgcggacgtggcctccctgaactaccagaacgaccacagcgattttttgaccacggtgatccaaaacaacgacttcaccccaaccgaggccagcactcagaccataaacctggataacaggtcgaactggggcggcgacctgaagaccatcttgcacaccaacatgcccaacgtgaacgagttcatgttcaccaactcttttaaggcgcgggtgatggtggcgcgcgagcagggggaggcgaagtacgagtgggtggacttcacgctgcccgagggcaactactcagagaccatgactctcgacctgatgaacaatgcgatcgtggaacactatctgaaagtgggcaggcagaacggggtgaaggaaagcgatatcggggtcaagtttgacaccagaaacttccgtctgggctgggaccccgtgaccgggctggtcatgccgggggtctacaccaacgaggcctttcatcccgacatagtgcttctgcccggctgtggggtggacttcacccagagccggctgagcaacctgctgggcattcgcaagcggcagcctttccaggagggtttcaagatcacctatgaggatctgaaggggggcaacattcccgcgctccttgatctggacgcctacgaggagagcttgaaacccgaggagagcgctggcgacagcggcgagagtggcgaggagcaagccggcggcggtggcggcgcgtcggtagaaaacgaaagtacgcccgcagtggcggcggacgctgcggaggtcgagccggaggccatgcagcaggacgcagaggagggcgcacaggagggcgcgcagaaggacatgaacgatggggagatcaggggagacacattcgccacccggggcgaagaaaaagaggcagaggcggcggcggcggcgacggcggaggccgaaaccgaggttgaggcagaggcagagcccgagaccgaagttatggaagacatgaatgatggagaacgtaggggcgacacgttcgccacccggggcgaagagaaggcggcggaggcagaagccgcggctgaggaggcggctgcggctgcggccaagactgaggctgcggctaaggctgaggtcgaagccaatgttgcggttgaggctcaggctgaggaggaggcggcggctgaagcagttaaggaaaaggcccaggcagagcaggaagagaaaaaacctgtcattcaacctctaaaagaagatagcaaaaagcgcagttacaacgtcatcgagggcagcacctttacccagtaccgcagctggtacctggcgtacaactacggcgacccggtcaagggggtgcgctcgtggaccctgctctgcacgccggacgtcacctgcggctccgagcagatgtactggtcgctgccgaacatgatgcaagacccggtgaccttccgctccacgcggcaggttagcaacttcccggtggtgggcgccgaactgctgcccgtgcactccaagagtttttacaacgagcaggccgtctactcccagctgatccgccaggccacctctctgacccacgtgttcaatcgctttcccgagaaccagattttggcgcgcccgccggcccccaccatcaccaccgtgagtgaaaacgttcctgccctcacagatcacgggacgctaccgctgcgcaacagcatctcaggagtccagcgagtgaccattactgacgccagacgccggacctgcccctacgtttacaaggccttgggcatagtctcgccgcgcgtcctctccagtcgcactttt

SEQ ID NO: 67 - DNA, 2865 bp, Gorilla beringei graueri
atggcgaccccatcgatgatgcctcagtggtcgtacatgcacatctcgggccaggacgcttcggagtacctgagccccgggctggtgcagttcgcccgcgccacagacacctacttcaacatgagtaacaagttcaggaaccccactgtggcgcccacccacgatgtgaccacggaccggtcgcagcgcctgacgctgcggttcatccccgtggatcgggaggacaccgcctactcttacaaggcgcggttcacgctggccgtgggcgacaaccgcgtgctggacatggcctccacttactttgacatcaggggggtgctggacaggggccccaccttcaagccctactcgggtactgcctacaactccctggcccccaagggcgctcccaattcttgcgagtgggaacaagaggaaaatcaggtggtcgctgcagatgatgaacttgaagatgaagaagcgcaagctcaagaggacgccccagctaaaaaaattcatgtatatgcccaggcgcctcttgctggcgaaaagattaccaaggatggtttgcaaataggtactgaagttgtaggagatacatctaaggacacttttgcagacaaaacattccaacccgaacctcagataggcgagtctcagtggaacgaggctgatgccacagtagcaggaggcagagtcttgaaaaaaaccacccctatgagaccttgctatggatcctatgccaggcctacaaatgccaacgggggtcaaggaattatggttgccaatgaacaaggagtgttggagtctaaagtggagatgcaatttttttctaacactacaacccttaatgcgcgggatggagctggcaatcccgaaccaaaggtggtgttgtacagtgaagatgtccacttggaatctcctgacactcatttgtcttacaagcccaaaaaggatgatgttaatgctaaaattatgttgggtcagcaagctatggctaacaggcccaacctcattgcttttagagataatttcattggactcatgtactacaacagcactggtaacatgggagtgctggcgggtcaggcctctcagttgaatgccgtggtggacctgcaggatagaaacacagaactgtcatatcagcttatgcttgattccattggggatagatccagatacttctccatgtggaaccaggcagtggatagctatgacccagatgtcagaatcattgaaaaccatggtgtcgaggacgagctacccaactactgcttccctctgggcggcataggaattactgatacttatcaagggatcaaaaataccaatggcaatggtcagtggaccaaagatgatcagttcgcggaccgtaatgaaataggggtgggaaacaacttcgccatggagatcaacatccaggccaacctctggaggaacttcctctatgcgaacgtggggctctacctgccagacaagctcaagtacaaccccaccaacgtggacatctctgacaaccccaacacctatgactacatgaacaagcgtgtggtggctcccggcctggtggactgctttgtcaatgtgggagccaggtggtccctggactacatggacaacgtcaaccccttcaaccaccaccgcaatgcgggtctgcgctaccgctccatgatcctgggcaacgggcgctacgtgcccttccacattcaggtgccccagaagttctttgccatcaagaacctcctcctcctgccgggctcctacacttacgagtggaacttcaggaaggatgtcaacatggtcctgcagagctctctgggcaatgaccttagggtggacggggccagcatcaagtttgacagcgtcaccctctatgctaccttcttccccatggctcacaacaccgcctccacgctcgaggccatgctgaggaacgacaccaacgaccagtccttcaatgactacctctctggggccaacatgctctaccccatccccgccaaggccaccaacgtgcccatctccattccctctcgcaactgggccgccttcagaggctgggcctttacccgccttaagaccaaggaaaccccctccctgggctcgggttttgacccctactttgtctactcgggatccatcccctacctggatggcaccttctacctcaaccacacttttaagaagatatccatcatgtatgactcctccgtcagctggccgggcaatgaccgcctgctcacccccaatgagttcgaggtcaagcgcgccgtggacggcgagggctacaacgtggcccagtgcaacatgaccaaggactggttcctggtgcagatgctggccaactacaacataggctaccagggcttctacatcccagagagctacaaggacaggatgtactccttcttcagaaatttccaacccatgagcaggcaggtggtggacgagaccaaatacaaggactatcaggccattggcatcactcaccagcacaacaactcgggattcgtgggctacctggctcccaccatgcgcgaggggcaggcctaccccgccaacttcccctacccgttgataggcaagaccgcggtcgacagcgtcacccagaaaaagttcctctgcgaccgcaccctctggcgcatccccttctctagcaacttcatgtccatgggtgcgctcacggacctgggccagaacctgctctatgccaactccgcccatgcgctggacatgacttttgaggtggaccccatggacgagcccacccttctctatattgtgtttgaagtgttcgacgtggtcagagtgcaccagccgcaccgcggtgtcatcgagaccgtgtacctgcgcacgcccttctcggccggcaacgccaccacc

SEQ ID NO: 68 - DNA, 1740 bp, Gorilla beringei graueri
atgaaacgcgcgagatcgtctgacgagaccttcaaccccgtgtacccctacgataccgagatcgctccgacttctgtccctttccttacccctccctttgtgtcatccgcaggaatgcaagaaaatccagctggggtgctgtccctgcacttgtcagagccccttaccacccacaatggggccctgactctaaaaatggggggcggcctgaccctggacaaggaagggaatctcacttcccaaaacatcaccagtgtcgatccccctctcaaaaaaagcaagaacaacatcagccttcagaccgccgcacccctcgccgtcagctccggggccctaacactttttgccactccccccctagcggtcagtggtgacaaccttactgtgcagtctcaggcccctctcactttggaagactcaaaactaactctggccaccaaaggacccctaactgtgtccgaaggcaaacttgtcctagaaacagaggctcccctgcatgcaagtgacagcagcagcctgggccttagcgttacggccccacttagcattaacaatgacagcctaggactagacatgcaagcgcccattagctctcgagatggaaaactggctctaacagtggcggcccccctaactgtggtcgagggtatcaatgctttggcagtagccacaggtaagggtattgggctaaatgaaaccaacacacacctgcaggcaaaactggtcgcacccctaggctttgataccaacggcaacattaagctaagcgttgcaggaggcatgaggctaaacaataacacactgatactagatgtaaactacccatttgaggctcaaggccaactgagcctaagagtgggctcgggcccactatatgtagattctagtagtcataacctaaccattagatgccttaggggattgtatataacatcttctaacaaccaaaacggtctagaagccaacattaaactaacaagaggccttgtgtatgacggaaatgccatagcagttaatgttggcaaagggctggaatacagccctactgacacaacagaaaaacctatacagactaaaataggtctaggcatggagtatgataccgagggagccatgatgacaaaactaggctctggactaagctttgacaattcaggagccattgtagtgggaaacaaaaatgatgacaggcttactttgtggaccacaccggacccatcgcccaactgtcagatctactctgaaaaagatgctaaactaaccttggtactgactaaatgtggcagtcaggttgtaggcacagtatctattgccgctcttaaaggtagcctcgtgccaatcactagtgcaatcagtgtggttcaggtatacctaaggtttgatgaaaatggggtactaatgagtaactcttcacttaatggcgaatactggaattttagaaacggagactcaactaatggcacaccatatacaaacgcagtgggtttcatgcctaatctactggcctatcctaaaggtcaaactacaactgcaaaaagtaacattgtcagccaggtctacatgaatggggacgatactaaacccatgacatttacaatcaacttcaatggccttagtgaaacaggggatacccctgttagtaaatattccatgacattctcatggaggtggccaaatggaagctacatagggcacaattttgtaacaaactcctttaccttctcctacatcgcccaagaa

SEQ ID NO: 69 - protein, 28 aa, Gorilla beringei graueri
GAASRASARDEKLTALLLKLEDLTRELA

SEQ ID NO: 70 - protein, 34 aa, Gorilla beringei graueri
CFVRDSVGLQEASFNVFQRPTISSNSHAIFRQIA

SEQ ID NO: 71 - protein, 15 aa, Gorilla beringei graueri
EEGAQEGAQKDMNDG

SEQ ID NO: 72 - protein, 37 aa, Gorilla beringei graueri
SLAPKGAPNSCEWEQEENQVVAADDELEDEEAQAQED

SEQ ID NO: 73 - protein, 15 aa, Gorilla beringei graueri
VEGINALAVATGKGI

SEQ ID NO: 74 - protein, 133 aa, Gorilla beringei graueri; identical to SEQ ID NO: 42

SEQ ID NO: 75 - protein, 1056 aa, Gorilla beringei graueri
MDSSNVRDVVIKLRPPSAEIWTCGSRGVVVCSTIALQETDAGGQTTKVEDHQPHGTPGGGLRFPLRFLVRGRQVHLVQDIQPVQRCQYCGRFYKSQHECSARRRDFYFHHINSQSSNWWREIQFFPIGSHPRTERLFVTYDVETYTWMGAFGKQLVPFMLVMKLGGNEALVAAARDLARELRWDPWEKDPLTFYCITPEKMAVGRQFRTFRDRLQTLMARDLWRSFLAANPHLQDWALEEHGLESPEELTYEELKKLPSIKGQPRFLELYIVGHNINGFDEIVLAAQVINNRSSVPGPFRITRNFMPRAGKILFNDLTFSLPNPRSKKRTDYTLWEQGGCDDTDFKHQYLKVMVRDTFALTHTSLRKAAQAYALPVEKGCCPYQAVNQFYMLGSYRSDTDGFPLQEYWKDREEFVLNRELWKKKGEDKYDIIRETLDYCALDVQVTAELVHKLRESYACFVRDSVGLQEASFNVFQRPTISSNSHAIFRQIAFRAERPQRTNLGPNMLAPSHELYDYVRASIRGGRCYPTYLGILREPLYVYDICGMYASALTHPMPWGPPLNPYERALAAREWQRALDMQACKIDYFDPRLLPGVFTIDADPPNEDQLDPLPPFCSRKGGRLCWTNERLRGEVATSVDMVTLHNRGWRVRLIPDERTTVFPEWKCVAREYVQLNIAAKERADRDKNQTLRSIAKLLSNALYGSFATKLDNKKIVFSDQMDPGTLKGITSGQVNIKSSSFLETDNLSAEVMPAFEREYLPQQLALADSDAEESEDERVPTPFYTPPSGTPGHVSYTYKPITFLDAEEGDMCLHTLEKVDPLVDNDRYPSHVASFVLAWTRAFVSEWSEFLYEEDRGTPLEDRPLKSVYGDTDSLFVTEKGHRLMESRGKKRIKKHGGNLVFDPDRPELTWLVECETVCASCGADAYSPESVFLAPKLYALKSLQCPSCGATSKGKLRAKGHAAEGLDYETMVKCYLADAQGEERQRFSTSRTSLKRTLASAQPGAHPFTVTQTTLTRTLRPWKDMTLAPLDAHRLVPYSESRPNPRNEEICWIEMP

SEQ ID NO: 76 - protein, 658 aa, Gorilla beringei graueri; identical to SEQ ID NO: 18

SEQ ID NO: 77 - protein, 955 aa, Gorilla beringei graueri
MATPSMMPQWSYMHISGQDASEYLSPGLVQFARATDTYFNMSNKFRNPTVAPTHDVTTDRSQRLTLRFIPVDREDTAYSYKARFTLAVGDNRVLDMASTYFDIRGVLDRGPTFKPYSGTAYNSLAPKGAPNSCEWEQEENQVVAADDELEDEEAQAQEDAPAKKIHVYAQAPLAGEKITKDGLQIGTEVVGDTSKDTFADKTFQPEPQIGESQWNEADATVAGGRVLKKTTPMRPCYGSYARPTNANGGQGIMVANEQGVLESKVEMQFFSNTTTLNARDGAGNPEPKVVLYSEDVHLESPDTHLSYKPKKDDVNAKIMLGQQAMANRPNLIAFRDNFIGLMYYNSTGNMGVLAGQASQLNAVVDLQDRNTELSYQLMLDSIGDRSRYFSMWNQAVDSYDPDVRIIENHGVEDELPNYCFPLGGIGITDTYQGIKNTNGNGQWTKDDQFADRNEIGVGNNFAMEINIQANLWRNFLYANVGLYLPDKLKYNPTNVDISDNPNTYDYMNKRVVAPGLVDCFVNVGARWSLDYMDNVNPFNHHRNAGLRYRSMILGNGRYVPFHIQVPQKFFAIKNLLLLPGSYTYEWNFRKDVNMVLQSSLGNDLRVDGASIKFDSVTLYATFFPMAHNTASTLEAMLRNDTNDQSFNDYLSGANMLYPIPAKATNVPISIPSRNWAAFRGWAFTRLKTKETPSLGSGFDPYFVYSGSIPYLDGTFYLNHTFKKISIMYDSSVSWPGNDRLLTPNEFEVKRAVDGEGYNVAQCNMTKDWFLVQMLANYNIGYQGFYIPESYKDRMYSFFRNFQPMSRQVVDETKYKDYQAIGITHQHNNSGFVGYLAPTMREGQAYPANFPYPLIGKTAVDSVTQKKFLCDRTLWRIPFSSNFMSMGALTDLGQNLLYANSAHALDMTFEVDPMDEPTLLYIVFEVFDVVRVHQPHRGVIETVYLRTPFSAGNATT

SEQ ID NO: 78 - protein, 580 aa, Gorilla beringei graueri
MKRARSSDETFNPVYPYDTEIAPTSVPFLTPPFVSSAGMQENPAGVLSLHLSEPLTTHNGALTLKMGGGLTLDKEGNLTSQNITSVDPPLKKSKNNISLQTAAPLAVSSGALTLFATPPLAVSGDNLTVQSQAPLTLEDSKLTLATKGPLTVSEGKLVLETEAPLHASDSSSLGLSVTAPLSINNDSLGLDMQAPISSRDGKLALTVAAPLTVVEGINALAVATGKGIGLNETNTHLQAKLVAPLGFDTNGNIKLSVAGGMRLNNNTLILDVNYPFEAQGQLSLRVGSGPLYVDSSSHNLTIRCLRGLYITSSNNQNGLEANIKLTRGLVYDGNAIAVNVGKGLEYSPTDTTEKPIQTKIGLGMEYDTEGAMMTKLGSGLSFDNSGAIVVGNKNDDRLTLWTTPDPSPNCQIYSEKDAKLTLVLTKCGSQVVGTVSIAALKGSLVPITSAISVVQVYLRFDENGVLMSNSSLNGEYWNFRNGDSTNGTPYTNAVGFMPNLLAYPKGQTTTAKSNIVSQVYMNGDDTKPMTFTINFNGLSETGDTPVSKYSMTFSWRWPNGSYIGHNFVTNSFTFSYIAQE

SEQ ID NO: 79 - DNA, 37211 bp, Gorilla beringei graueri
catcatcaataatataccttattttggattgtggccaatatgataatgaggtgggcggggagaggcggggcgggtgacgtaggacgcgcgagtagggttgggaggtgtggcggaagtgtggcatttgcaagtgggaggagctcacatgcaagcttccgtcgcggaaaatgtgacgtttttgatgagcgccgcctacctccggaagtgccaattttcgcgcgcttttcaccggatatcgtagtaattttgggcgggaccatgtaagatttggccattttcgcgcgaaaagtgaaacggggaagtgaaaactgaataatagggcgttagtcatagtgcgtaatatttaccgagggccgagggactttgaccgattacgtggaggactcgcccaggtgttttttacgtgaatttccgcgttccgggtcaaagtctccgttttattgtcaccgtcatttgacgcggagggtatttaaacccgctgcgctcctcaagaggccactcttgagtgccagcgagaagagttttctcctctgctccgcttcggtgatcgaaaaatgagacacatagcctgcactccgggtcttttgtccggtcgggcggcggccgagcttttggacgctttgatcaatgatgtcctgagcgatgattttccgtctactacccactttagcccacctactcttcacgaactgtacgatctggatgtactggtggatgtgaacgatcccaacgaggaggcggtttctgcgttttttcccgagtctgcgctgttggccgctcaggagggatttgacctacacactccgccgcctattttagagtctccgctgccggagcccagtggtataccttatatgcctgaactgcttcccgaagtggtagacctgacctgccacgagcctggctttccgcccagcgacgatgatggtgagccttttgttttagactttgctgagatacctgggcacggttgcaggtcttgtgcatatcatcagagggttaccggagaccccgaggttaagtgttcgctgtgctatatgaggatgacctcttcctttatctacagtaagtttttgtctaggtgggcttttgggtaggtgggttttgtgtcagaacaggtgtaaacgttgcttgtgttttttgtacctgtaggtccggtgtccgagccagacccggagcccgaccgcgatcccgagccggatcccgagcctcctcgtagggcaagaaaattaccttctattctgtgcaagtctaagacacctgtgaggaccagcgaggcggacagcaccgactctggcacttctacctctcctcctgaaattcacccagtggttcctctgggtatacatagacctgttgctgttagagtttgcgggcgacgctctgcagtagagtgcattgaggacttgcttcacgaacccgaggaacctttggacttgagcgttaaacgccctaggcaataaaccccacctaagtaataaaccccacctaagtaataaaccctgccgcccttggttattgagatgacgcccaatgtttgcttttgaatgacttcatgtgtgtaataaaagtgagtgtgatcataggtctcttgtttgtctgggcggggcttaagggtatataagtctcttggggctaaacttggttacacttgaccccaatggaggcgtgggggtgcttggaggagtttgcggacgtgcgccgtttgctggacgagagctctagcaatacctatactatttggaggtatctgtggggctctactcaggccaagttggtctccagaattaagcaggattacaagtgcgattttgaagagctttttagttcctgcggtgagcttttgcaatccttgaatctgggccatcaggctattttccaggaaaaggttctctcgactttggatttttccactcccgggcgcaccgccgcttgtgtggcttttgtgtcttttgtgcaagataaatggagcgaggagacccacctgagtcacggctacgtactggatttcatggcgatggctctttggagggcttacaacaaatggaagattcagaaggaactgtacggttccgccctacgtcgtccacttctgtcgcgacaggggctgaggtttcccgaccatcggcagcatcagaatctggaagacgagtcggaggagcgagcggaggagaagatcagcttgagagccggcctggaccctcctcaggaggaatgaatctcccgcaggtggttgacctgtttccagaactgagacgggtcctgactatcagggaggatggtcagtttgtgaagaagtttaagagggatcggggtgagggagatgatgaggcggctagcaatttagcttttagtctgatgactcgccaccgaccggaatgtattacctatcagcagattaaggagagttgtgccaacgagctggatcttttgggtcagaagtatagcatagaacagcttaccacttactggcttcagcctggggatgattgggaagaggcgatcagggtgtatgcaaaggtggccctgcggcccgattgcaagtataagattactaagttggttaatattagaaactgctgctatatttctgggaacggggccgaagtggagatagatactcaggacagggtggcttttaggtgttgcatgataaacatgtggcccgggatactggggatggatggggtggtattcatgaatgtgaggtttacgggccccaactttaatggcacggtgttcatgggcaacaccaacttgctcctgcatggtgcgagtttctatgggtttaataacacctgtatagaggcctggaccgatgtaaaggttcgaggttgttccttttatagctgttggaaggcggtggtgtgtcgccctaaaagcaggggttctgtgaaaaaatgcttgtttgaaaggtgcaccttaggcatcctctctgagggcaactccagggtgcgccataatgtggcttcgaactgcggttgcttcatgcaagtgaagggggtgagcgttatcaagcataactcggtgtgtggaaactgcgaggatcgcgcctcccagatgctgacctgctttgatggcaactgtcacctgttgaagaccattcatataagcagccaccccagaaaggcctggcccgtgtttgagcataacatcttgacccgctgctccttgcatctgggggtcaggaggggtatgttcctgccttaccagtgtaactttagccacactaaaatcctgctggaacccgagtgcatgaccaaggtcagcctgaatggtgtgtttgatgtgactctgaaaatctggaaggtgctgaggtatgatgagaccaggaccaggtgccgaccctgcgagtgcggcggcaagcacatgagaaatcagcctgtgatgttggatgtgaccgaggagcttaggcctgaccatctggtgctggcctgcaccagggccgagtttgggtctagcgatgaggataccgattgaggtgggtaaggtgggcgtggctagaagggtggggcgtgtataaattgggggtctaagggtctctctgttttgtcttgcaacagccgccgccatgagcgacaccggcaacagctttgatggaagcatctttagcccctatctgacagtgcgcatgcctcactgggctggagtgcgtcagaatgtgatgggttccaacgtggatggacgccccgttctgccttcaaattcgtctacaatggcctacgcgaccgtgggaggaactccgctggacgccgcgacctccgccgccgcctccgccgccgccgcgaccgcgcgcagcatggctacggacctttacagctctttggtggcgagcggcgcggcctctcgcgcgtctgctcgggatgagaaactgaccgctctgctgcttaaactggaagacttgacccgggagctggctcaactgacccagcaggtctccagcttgcgtgagagcagccttgcctccccctaatggcccataatataaataaaagccagtctgtttggattaagcaagtgtatgttctttatttaactctccgcgcgcggtaagcccgggaccagcggtctcggtcgtttagggtgcggtggattctttccaacacgtggtacaggtggctctggatgtttagatacatgggcatgagtccatccctggggtggaggtagcaccactgcagagcttcgtgctcgggggtggtgttgtatatgatccagtcgtagcaggagcgctgggcgtggtgctgaaaaatgtccttaagcaagaggcttatagctagggggaggcccttggtgtaagtgtttacaaatctgctcagttgggaggggtgcatccggggggatataatgtgcatcttggactggatttttaggttggctatgttcccacccagatcccttctgggattcatgttgtgcaggaccaccagcacggtatatccagtacacttgggaaatttatcgtggagcttagacgggaatgcatggaagaacttggagacgcccttgtggcctcccagattttccatacattcgtccatgatgatggcaatgggcccgtgggaagctgcctgagcaaaaatgtttctgggatcgctcacatcgtagttatgttccagggtgaggtcatcataggacatctttacaaatcgggggcggagggtcccggactgggggatgatggtgccctcgggccccggggcgtagttcccctcacagatctgcatctcccaggctttcatttcagagggagggatcatatccacctgcggagcgatgaaaaacacagtttctggcgcaggggagattaactgggatgagagcaggtttctgagcagctgtgactttccacagccggtgggcccatatatcacgcctatcaccggctgcagctggtagttaagagagctgcagctgccgtcctcccggagcaggggggccacctcgttcagcatatccctgacgtggatgttctccctgaccaattccgccagaaggcgctcgccgcccagcgaaagcagctcttgcaaggaagcaaaatttttcagcggttttaggccgtcggccgtgggcatgtttttcagcgtctgggtcagcagttccagtctgtcccacagctcggtgatgtgctctacggcatctcgatccagcagatctcctcgtttcgcgggttggggcggctttcgctgtagggcaccagccgatgggcgtccagcggggccagagtcatgtccttccatgggcgcagggtcctcgtcagggtggtctgggtcacggtgaaggggtgcgctccgggttgggcgctggccagggtgcgcttgaggctggttctgctggtgctgaatcgctgccgctcttcgccctgcgcgtcggccaggtagcatttgaccatggtctcgtagtcgagaccctcggcggcgtgccccttggcgcggagctttcccttggaggtggcgccgcacgaggggcactgcaggctcttcagggcgtagagcttgggagcgagaaacacggactctggggagtaggcgtccgcgccgcaggaagcgcagaccgtctcgcattccaccagccaagtgagctccgggcggtcagggtcaaaaaccaggttgcccccatgctttttgatgcgtttcttacctcggctctccatgaggcggtgtcccttctcggtgacgaagaggctgtccgtgtctccgtagaccgacttcaggggcctgtcttccagcggagtgcctctgtcctcctcgtagagaaactctgaccactctgagacgaaggcccgcgtccaggccaggacgaaggaggccacgtgggaggggtagcggtcgttgtccactagcgggtccaccttctccagggtgtgcaggcacatgtccccctcctccgcgtccagaaaagtgattggcttgtaggtgtaggacacgtgaccgggggttcccgacgggggggtataaaagggggtgggcaccctttcatcttcactctcttccgcatcgctgtctgcgagagccagctgctggggtaagtattccctctcgaaggcgggcatgacctcagcgctcaggttgtcagtttctaaaaatgaggaggatttgatgttcacctgtccggaggtgatacctttgagggtacctgggtccatctggtcagaaaacactatttttttgttgtcaagcttggtggcgaacgacccgtagagggcgttggagagcagcttggcgatggagcgcagggtctggtttttgtcgcggtcggctcgctccttggccgcgatgttgagttgcacgtactcgcgggccacgcacttccactcggggaagacggtggtgcgctcgtctgggatcaggcgcaccctccagcctcggttgtgcagggtgaccatgtcgacgctggtggcgacctcgccgcgcaggcgctcgttggtccagcagaggcggccgcccttgcgcgagcagaaggggggtagggggtccagctggtcctcgtttggggggtccgcgtcgatggtgaagaccccggggagcaagcgcgggtcaaagtagtcgatcttgcaagcttgcatgtccagagcccgctgccattcgcgggcggcgagcgcgcgctcgtaggggttgaggggcgggccccagggcatggggtgggtgagcgcggaggcgtacatgccgcagatgtcatacacgtacaggggttccctgaggatgccgaggtaggtggggtagcagcgccccccgcggatgctggcgcgcacgtagtcatagagctcgtgggagggggccagcatgttgggcccgaggttggtgcgctgggggcgctcggcgcggaaggcgatctgcctgaagatggcatgggagttggaggagatggtgggccgctggaagacgttgaagcttgcttcttgcaagcccaccgagtccctgacgaagcaggcgtaggactcgcgcagcttgtgcaccagctcggcggtgacctggacgtcgagcgcgcagtagtcgagggtctcgcggatgatgtcatacttatcctcccccttctttttccacagctcgcggttgaggacgaactcttcgcggtctttccagtactcttggaggggaaacccgtccgtgtccgaacggtaagagcctagcatgtagaactggttgacggcctggtaggggcaacagcccttctccacgggcagcgcgtaggcctgcgccgccttgcggagggaggtgtgggtgagggcgaaagtgtccctgaccatgactttgaggtattgatgtttgaagtctgtgtcatcgcagccgccctgttcccacagggtgtagtccgtgcgctttttggagcgcgggttgggcagggagaaggtgaggtcattgaagaggatcttccccgctcgaggcatgaagtttctggtgatgcgaaagggccctgggaccgaggagcggttgttgatgacctgggcggccaggacgatctcgtcaaagccgtttatgttgtggcccacgatgtagagctccaaaaagcggggctggcccttgatggaggggagctttttgagttcctcgtaggtgagctcctcgggcgattccaggccgtgctcctccagggcccagtcttgcaagtgagggttggccgccaggaaggatcgccagaggtcgcgggccatgagggtctgcaggcggtcgcggaaggttctgaactgtcgccccacggccatcttttcgggggtgatgcagtagaaggtgagggggtctttctcccaggggtcccatctgagctctcgggcgaggtcgcgcgcggcggcgaccagagcctcgttgccccccagtttcatgaccagcatgaagggcacgagctgcttgccaaaggctcccatccaagtgtaggtctctacatcgtaggtgacaaagaggcgctccgtgcgaggatgagagccgatcgggaagaactggatctcccgccaccagttggaggattggctgttgatgtggtgaaagtagaagtcccgtctgcgggccgagcactcgtgctggcttttgtaaaagcgaccgcagtactggcagcgctgcacgggttgtatatcttgcacgaggtgaacctggcgacctctgacgaggaagcgcagcgggaatctaagtcccccgcctggggtcccgtgtggctggtggtcttctactttggttgtctggccgccagcatctgtctcctggagggcgatggtggagcagaccaccacgccgcgagagccgcaggtccagatctcggcgctcggcgggcggagtttgatgacgacatcgcgcacattggagctgtccatggtctccagctcccgcggcggcaggtcagctgggagttcctggaggttcacctcgcagagacgggtcaaggcgcgggcagtgttgagatggtatctgatttcaaggggcgtgttggcggcggagtcgatggcttgcaggaggccgcagccccggggggccacgatggttccccgcggggcgcgaggggaggcggaagctgggggtgtgttcagaagcggtgacgcgggcgggcccccggaggtagggggggttccggccccacaggcatgggcggcaggggcacgtcttcgccgcgcgcgggcaggggctggtgctggctccgaagagcgcttgcgtgcgcgacgacgcgacggttggtgtcctgtatctgacgcctctgagtgaagaccacgggtcccgtgaccttgaacctgaaagagagttcgacagaatcaatctcggcatcgttgacagcggcctggcgcaggatctcctgcacgtcgcccgagttgtcctggtaggcgatctctgccatgaactgctcgatctcttcttcctggagatctcctcgtccggcgcgctccacggtggccgccaggtcgttggagatgcgacccatgagctgcgagaaggcgttgagcccgccctcgttccagacccggctgtagaccacgcccccctcggcgttgcgggcgcgcatgaccacctgggccaggttgagctccacgtgtcgcgtgaagacggcgtagttgcgcaggcgctggaaaaggtagttcagggtggtggcggtgtgctcggcgacgaagaagtacatgacccagcgccgcaacgtggattcattgatgtcccccaaggcctccaggcgctccatggcctcgtagaagtccacggcgaagttgaaaaactgggagttgcgagcggacacggtcaactcctcctccagaagacggatgagctcggcgacagtgtcgcgcacctcgcgctcgaaggccacggggggcgcttcttcctcttccacctcttcttccatgatcgcttcttcttcttcctcagccgggacgggagggggcggcggcggcgggggaggggcgcggcggcggcggcggcgcaccgggaggcggtcgatgaagcgctcgatcatctccccccgcatgcggcgcatggtctcggtgacggcgcggccgttctcccgggggcgcagctcgaagacgccgcctctcatctcgccgcggggcgggcggccgtgaggtagcgagacggcgctgactatgcatcttaacaattgctgtgtaggtacaccgccgagggacctgattgagtccagatccaccggatccgaaaacctttggaggaaagcgtctatccagtcgcagtcgcaaggtaggctgagcaccgtggcgggcgggggcgggtctggagagttcctggcggagatgctgctgatgatgtaattaaagtaggcggtcttgagaaggcggatggtggacaggagcaccatgtctttgggtccggcctgttggatgcggaggcggtcggccatgccccaggcctcgttctgacaccggcgcaggtctttgtagtagtcttgcatgagtctttccaccggcacctcttctccttcctcttctccatctcgccggtggtttctcgcgccgcccatgcgcgtgaccccaaagcccctgagcggctgcagcagggccaggtcggcgaccacgcgctcggccaagatggcctgctgcacctgagtgagggtcctctcgaagtcatccatgtccacgaagcggtggtaggcgcccgtgttgatggtgtaggtgcagttggccatgacggaccagttgacggtctggtgtcccggctgcgagagctccgtgtaccgcaggcgcgagaaggcgcgggaatcgaacacgtagtcgttgcaagtccgcaccagatactggtagcccaccaggaagtgcggcggaggttggcgatagaggggccagcgctgggtggcgggggcgccgggcgccaggttttccagcatgaggcggtggtatccgtagatgtacctggacatccaggtgatgccggcggcggtggtggtggcgcgcgcgtagtcgcggacccggttccagatgtttcgcaggggcgagaagtgttccatggtcggcacgctctggccggtgaggcgcgcgcagtcgttgacgctctatacacacacaaaaacgaaagcgtttacagggctttcgttctgtagcctggaggaaagtaaatgggttgggttgcggtgtgccccggttcgagaccaagctgagctcggccggctgaagccgcagctaacgtggtattggcagtcccgtctcgacccaggccctgtatcctccaggatacggtcgagagcccttttgctttcttggccaagcgcccgtggcgcgatctgggatagatggtcgcgatgagaggacaaaagcggctcgcttccgtagtctggagaaacaatcgccagggttgcgttgcggcgtaccccggttcgagcccctatggcggcttgaatcggccggaaccgcggctaacgagggccgtggcagccccgtcctcaggaccccgccagccgacttctccagttacgggagcgagccccttttgttttttattttttagatgcatcccgtgctgcggcagatgcgcccctcgccccggcccgatcagcagcagcaacagcaggcatgcagacccccctctcccctttccgccccggtcaccacggccgcggcggccgtgtcgggcgcggggggcgcgctggagtcagatgagccaccgcggcggcgacctaggcagtatctggacttggaagagggcgagggactggcgcggctgggggcgaactctccagagcgccacccgcgggtgcagttgaaaagggacgcgcgcgaggcgtacctgccgcggcagaacctgtttcgcgaccgcgggggcgaggagcccgaggagatgcgagactgcaggttccaagcggggcgcgagctgcggcgcgggctggacagacagcgcctgctgcgcgaggaggactttgagcccgacacgcagacgggcatcagccccgcgcgcgcgcacgtagccgcggccgacctggtgaccgcctacgagcagacggtgaaccaggagcgcaacttccaaaagagcttcaacaaccacgtgcgcacgctggtggcgcgcgaggaggtgaccctgggtctcatgcatctgtgggacctggtggaggcgatcgtgcagaaccccagcagcaagcccctgaccgcgcagctgttcctggtggtgcagcacagcagggacaacgaggccttcagggaggcgctgctgaacatcaccgagccggaggggcgctggctcctggacctgataaacatcctgcagagcatagtggtgcaggagcgcagcctgagcctggccgagaaggtggcggccatcaactactctatgctgagcctgggcaagttctacgcccgcaagatctacaagaccccctacgtgcccatagacaaggaggtgaagatagacagcttctacatgcgcatggcgctgaaggtgctgaccctgagcgacgacctgggagtgtaccgcaacgagcgcatccacaaggccgtgagcgccagccggcggcgcgagctgagcgaccgcgagctgatgcacagtctgcagcgcgcgctgaccggcgcgggcgagggcgacagggaggtcgagtcctacttcgacatgggggccgacctgcactggcagccgagccgccgcgccctggaggcggcgggggcgtacggcggccccctggcggccgatgaccaggaagaggaggactatgagctagaggagggcgagtacctggaggactgacctggctggtggtgttttggtatagatgcaagatccgaacgtggcggacccggcggtccgggcggcgctgcaaagccagccgtccggcattaactcctctgacgactgggccgcggccatgggtcgcatcatggccctgaccgcgcgcaaccccgaggctttcaggcagcagcctcaggccaaccggctggcggccatcttggaagcggtagtgcccgcgcgctccaaccccacccacgagaaggtgctggccatagtcaacgcgctggcggagagcagggccatccgcgcggacgaggccggactggtgtacgatgcgctgctgcagcgggtggcgcggtacaacagcggcaacgtgcagaccaacctggaccgcctggtgacggacgtgcgcgaggccgtggcgcagcgcgagcgcttgcatcaggacggtaacctgggctcgctggtggcgctaaacgccttcctcagcacccagccggccaacgtaccgcgggggcaggaggactacaccaactttttgagcgcgctgcggctgatggtgaccgaggtccctcagagcgaggtgtaccagtcggggcccgactacttcttccagaccagcagacagggcttgcaaaccgtgaacctgagccaggctttcaagaacctgcgggggctgtggggagtgaaggcgcccaccggcgaccgggctacggtgtccagcctgctaacccccaactcgcgcctgctgctgctgctgatcgcgcccttcacggacagcgggagcgtctcgcgggagacctatctgggccacctgctgacgctgtaccgcgaggccatcgggcaggcgcaggtggacgagcacaccttccaagagatcaccagcgtgagccacgcgctggggcaggaggacacgggcagcctgcaggcgaccctgaactacctgctgaccaacaggcggcagaagattcccacgctgcacagcctgacccaggaggaggagcgcatcttgcgctacgtgcagcagagcgtgagcctgaacctgatgcgcgacggcgtgacgcccagcgtggcgctggacatgaccgcgcgcaacatggaaccgggcatgtacgcctcccaccggccgttcatcaaccgcctgatggactacttgcatcgggcggcggccgtgaaccccgagtacttcactaatgccattctgaatccccactggatgccccctccgggtttctacaacggggactttgaggtgcccgaggtcaacgacgggttcctctgggatgacatggatgacagtgtgttctcacccaacccgctgcgcgccgcgtctctgcgattgaaggagggctctgacagggaaggaccgagaagtctggcctcctccctggctctgggagcggtgggcgccacgggcgcggcggcgcggggcagtagccccttccccagcctggcagactctctgaacagcgggcgggtgagcaggccccgcttgctaggcgaggaggagtatctgaacaactccctgctgcagcccgcgagggacaagaacgctcagcggcagcagtttcccaacaatgggatagagagcctggtggacaagatgtccagatggaagacgtatgcgcaggagtacaaggagtgggaggaccgccagccgcggcccttgccgccccctaggcagcgctggcagcggcgcgcgtccaaccgccgctggaggcaggggcccgaggacgatgatgactctgcagatgacagcagcgtgttggacctgggcgggagcgggaaccccttttcgcacctgcgcccacgcctgggcaagatgttttaaaagaaaaaaaaaaaataaaactcaccaaggccatggcgacgagcgttggttttttgttcccttccttagtatgcggcgcgcggcgatgttcgaggaggggcctcccccctcttacgagagcgcgatggggatttctcctgcggcgcccctgcagcctccctacgtgcctcctcggtacctgcaacctacaggggggagaaatagcatctgttactctgagctgcagcccctgtacgataccaccagactgtacctggtggacaacaagtccgcggacgtggcctccctgaactaccagaacgaccacagcgattttttgaccacggtgatccaaaacaacgacttcaccccaaccgaggccagcactcagaccataaacctggataacaggtcgaactggggcggcgacctgaagaccatcttgcacaccaacatgcccaacgtgaacgagttcatgttcaccaactcttttaaggcgcgggtgatggtggcgcgcgagcagggggaggcgaagtacgagtgggtggacttcacgctgcccgagggcaactactcagagaccatgactctcgacctgatgaacaatgcgatcgtggaacactatctgaaagtgggcaggcagaacggggtgaaggaaagcgatatcggggtcaagtttgacaccagaaacttccgtctgggctgggaccccgtgaccgggctggtcatgccgggggtctacaccaacgaggcctttcatcccgacatagtgcttctgcccggctgtggggtggacttcacccagagccggctgagcaacctgctgggcattcgcaagcggcagcctttccaggagggtttcaagatcacctatgaggatctgaaggggggcaacattcccgcgctccttgatctggacgcctacgaggagagcttgaaacccgaggagagcgctggcgacagcggcgagagtggcgaggagcaagccggcggcggtggcggcgcgtcggtagaaaacgaaagtacgcccgcagtggcggcggacgctgcggaggtcgagccggaggccatgcagcaggacgcagaggagggcgcacaggagggcgcgcagaaggacatgaacgatggggagatcaggggagacacattcgccacccggggcgaagaaaaagaggcagaggcggcggcggcggcgacggcggaggccgaaaccgaggttgaggcagaggcagagcccgagaccgaagttatggaagacatgaatgatggagaacgtaggggcgacacgttcgccacccggggcgaagagaaggcggcggaggcagaagccgcggctgaggaggcggctgcggctgcggccaagactgaggctgcggctaaggctgaggtcgaagccaatgttgcggttgaggctcaggctgaggaggaggcggcggctgaagcagttaaggaaaaggcccaggcagagcaggaagagaaaaaacctgtcattcaacctctaaaagaagatagcaaaaagcgcagttacaacgtcatcgagggcagcacctttacccagtaccgcagctggtacctggcgtacaactacggcgacccggtcaagggggtgcgctcgtggaccctgctctgcacgccggacgtcacctgcggctccgagcagatgtactggtcgctgccgaacatgatgcaagacccggtgaccttccgctccacgcggcaggttagcaacttcccggtggtgggcgccgaactgctgcccgtgcactccaagagtttttacaacgagcaggccgtctactcccagctgatccgccaggccacctctctgacccacgtgttcaatcgctttcccgagaaccagattttggcgcgcccgccggcccccaccatcaccaccgtgagtgaaaacgttcctgccctcacagatcacgggacgctaccgctgcgcaacagcatctcaggagtccagcgagtgaccattactgacgccagacgccggacctgcccctacgtttacaaggccttgggcatagtctcgccgcgcgtcctctccagtcgcactttttaaaacacatctacccacacgttccaaaatcatgtccgtactcatctcacccagcaacaacaccggctgggggctgcgcgcgcccagcaagatgtttggaggggcgaggaagcgctccgaccagcaccctgtgcgcgtgcgcggccactaccgcgcgccctggggagcgcacaagcgcgggcgcacagggcgcaccactgtggacgacgtcattgactccgtagtggagcaagcgcgccactacacacccggcgcgccgaccgcccccgccgtgtccaccgtggaccaggcgatcgaaagcgtggtacagggcgcgcggcactatgccaaccttaaaagtcgccgccgccgcgtggcccgccgccatcgccggagaccccgggccaccgccgccgcgcgccttactaaggctctgctcaggcgcgccaggcgaactggccaccgggccgccatgagggccgcacggcgggctgccgctgccgcaagcgccgtggccccgcgggcacgaaggcgcgcggccgccgccgccgccgccgccatttccagcttggcctcgacgcggcgcggtaacatatactgggtgcgcgactcggtaaccggcacgcgggtacccgtgcgctttcgccccccgcggaattagcacaagacaacatacacactgagtctcctgctgttgtgtatcccagcggcgaccgtcagcagcggcgacatgtccaagcgcaaaattaaagaagagatgctccaggtcatcgcgccggagatctatgggcccccgaagaaggaggaggatgattacaagccccgcaagctaaagcgggtcaaaaagaaaaagaaagatgatgatgatgacgaggcggtggagtttgtccgccgcatggcacccaggcgccccgtgcagtggaagggccggcgcgtgcagcgcgttttgcgccccggcaccgcggtggtcttcacgcccggcgagcgctccacgcgcactttcaagcgggtgtacgatgaggtgtacggcgacgaggacctgttggagcaggccaaccagcgctttggggagtttgcatatgggaaacggccccgcgagagtctaaaagaggacctgctggcgctaccgctggacgagggcaatcccaccccgagtctgaagccggtaaccctgcaacaggtgctgcctttgagcgcgcccagcgagcataagcgagggttgaagcgcgaaggcggggacctggcgcccaccgtgcagttgatggtgcccaagcggcagaagctggaggacgtgctggagaaaatgaaagtagagcccgggatccagcccgagatcaaggtccgccccatcaagcaggtggcgcccggcgtgggagtccagaccgtggacgttaggattcccacggaggagatggaaacccaaaccgccactccctcttcggcggccagcgccaccaccggcaccgcttcggtagaggtgcagacggacccctggctacccgccaccgctgttgccgccgccgccccccgttcgcgcgggcgcaagagaaattatccagcggccagcgcgctcatgccccagtacgcactgcatccatccatcgcgcccacccccggctaccgcgggtactcgtaccgcccgcgcagatcagccggcactcgcggccgccgccgccgtgcgaccacaaccagccgccgccgtcgccgccgccgccagccagtgctgacccccgtgtctgtaaggaaggtggctcgctcggggagcacgctggtggtgcccagagcgcgctaccaccccagcatcgtttaaagccggtctctgtatggttcttgcagatatggccctcacttgtcgcctccgcttcccggtgccgggataccgaggaagaactcaccgccgcagaggcatggcgggcagcggtctccgcggcggccgtcgccatcgccggcgcgcaaaaagcaggcgcatgcgcggcggtgtgctgcctctgctaatcccgctaatcgccgcggcgatcggtgccgtacccgggatcgcctccgtggccctgcaggcgtcccagaaacgttgactcttgcaaccttgcaagcttgcattttttggaggaaaaataaaaaaagtctagactctcacgctcgcttggtcctgtgactattttgtagaaaaaagatggaagacatcaactttgcgtcgctggccccgcgtcacggctcgcgcccgttcatgggagactggacagatatcggcaccagcaatatgagcggtggcgccttcagctggggcagtctgtggagcggccttaaaaattttggttccaccattaagaactatggcaacaaagcgtggaacagcagcacgggccagatgctgagagacaagttgaaagagcagaacttccaggagaaggtggcgcagggcctggcctctggcatcagcggggtggtggacatagctaaccaggccgtgcagaaaaagataaacagtcatctggacccccgtcctcaggtggaggaaatgcctccagcgatggagacggtgtctcccgagggcaaaggcgaaaagcgcccgcggcccgacagagaagagaccctggtgtcacacaccgaggagccgccctcttacgaggaggcagtcaaggccggcctgcccaccactcgccccatagcccccatggccaccggtgtggtgggccacaggcaacacactcccgcaacactagatctgcccccgccgtccgagccgccgcgccagccaaaggcggcgacggtgcccgctccctccacttccgccgccaacagagtgcccctgcgccgcgccgcgagcggcccccgggcctcgcgagttagcggcaactggcagagcacactgaacagcatcgtgggcctgggagtgaggagtgtgaagcgccgccgttgctactgaatgagcaagctagctaacgtgttgtatgtgtgtatgcgtcctatgtcgccgccagaggagctgttgagccgccggcgccgtctgcactccagcgaatttcaagatggcgaccccatcgatgatgcctcagtggtcgtacatgcacatctcgggccaggacgcttcggagtacctgagccccgggctggtgcagttcgcccgcgccacagacacctacttcaacatgagtaacaagttcaggaaccccactgtggcgcccacccacgatgtgaccacggaccggtcgcagcgcctgacgctgcggttcatccccgtggatcgggaggacaccgcctactcttacaaggcgcggttcacgctggccgtgggcgacaaccgcgtgctggacatggcctccacttactttgacatcaggggggtgctggacaggggccccaccttcaagccctactcgggtactgcctacaactccctggcccccaagggcgctcccaattcttgcgagtgggaacaagaggaaaatcaggtggtcgctgcagatgatgaacttgaagatgaagaagcgcaagctcaagaggacgccccagctaaaaaaattcatgtatatgcccaggcgcctcttgctggcgaaaagattaccaaggatggtttgcaaataggtactgaagttgtaggagatacatctaaggacacttttgcagacaaaacattccaacccgaacctcagataggcgagtctcagtggaacgaggctgatgccacagtagcaggaggcagagtcttgaaaaaaaccacccctatgagaccttgctatggatcctatgccaggcctacaaatgccaacgggggtcaaggaattatggttgccaatgaacaaggagtgttggagtctaaagtggagatgcaatttttttctaacactacaacccttaatgcgcgggatggagctggcaatcccgaaccaaaggtggtgttgtacagtgaagatgtccacttggaatctcctgacactcatttgtcttacaagcccaaaaaggatgatgttaatgctaaaattatgttgggtcagcaagctatggctaacaggcccaacctcattgcttttagagataatttcattggactcatgtactacaacagcactggtaacatgggagtgctggcgggtcaggcctctcagttgaatgccgtggtggacctgcaggatagaaacacagaactgtcatatcagcttatgcttgattccattggggatagatccagatacttctccatgtggaaccaggcagtggatagctatgacccagatgtcagaatcattgaaaaccatggtgtcgaggacgagctacccaactactgcttccctctgggcggcataggaattactgatacttatcaagggatcaaaaataccaatggcaatggtcagtggaccaaagatgatcagttcgcggaccgtaatgaaataggggtgggaaacaacttcgccatggagatcaacatccaggccaacctctggaggaacttcctctatgcgaacgtggggctctacctgccagacaagctcaagtacaaccccaccaacgtggacatctctgacaaccccaacacctatgactacatgaacaagcgtgtggtggctcccggcctggtggactgctttgtcaatgtgggagccaggtggtccctggactacatggacaacgtcaaccccttcaaccaccaccgcaatgcgggtctgcgctaccgctccatgatcctgggcaacgggcgctacgtgcccttccacattcaggtgccccagaagttctttgccatcaagaacctcctcctcctgccgggctcctacacttacgagtggaacttcaggaaggatgtcaacatggtcctgcagagctctctgggcaatgaccttagggtggacggggccagcatcaagtttgacagcgtcaccctctatgctaccttcttccccatggctcacaacaccgcctccacgctcgaggccatgctgaggaacgacaccaacgaccagtccttcaatgactacctctctggggccaacatgctctaccccatccccgccaaggccaccaacgtgcccatctccattccctctcgcaactgggccgccttcagaggctgggcctttacccgccttaagaccaaggaaaccccctccctgggctcgggttttgacccctactttgtctactcgggatccatcccctacctggatggcaccttctacctcaaccacacttttaagaagatatccatcatgtatgactcctccgtcagctggccgggcaatgaccgcctgctcacccccaatgagttcgaggtcaagcgcgccgtggacggcgagggctacaacgtggcccagtgcaacatgaccaaggactggttcctggtgcagatgctggccaactacaacataggctaccagggcttctacatcccagagagctacaaggacaggatgtactccttcttcagaaatttccaacccatgagcaggcaggtggtggacgagaccaaatacaaggactatcaggccattggcatcactcaccagcacaacaactcgggattcgtgggctacctggctcccaccatgcgcgaggggcaggcctaccccgccaacttcccctacccgttgataggcaagaccgcggtcgacagcgtcacccagaaaaagttcctctgcgaccgcaccctctggcgcatccccttctctagcaacttcatgtccatgggtgcgctcacggacctgggccagaacctgctctatgccaactccgcccatgcgctggacatgacttttgaggtggaccccatggacgagcccacccttctctatattgtgtttgaagtgttcgacgtggtcagagtgcaccagccgcaccgcggtgtcatcgagaccgtgtacctgcgcacgcccttctcggccggcaacgccaccacctaaggagacagcgccgccgcctgcatgacgggttccaccgagcaagagctcagggccatcgccagagacctgggatgcggaccctattttttgggcacctatgacaaacgcttcccgggcttcatctcccgagacaagctcgcctgcgccatcgtcaacacggccgcgcgcgagaccgggggcgtgcactggctggcctttggctgggacccgcgctccaaaacctgctacctcttcgacccctttggcttctccgatcagcgcctcagacagatctatgagtttgagtacgaggggctgctgcgccgcagcgcgcttgcctcctcgcccgaccgctgcatcacccttgagaagtccaccgagaccgtgcaggggccccactcggccgcctgcggtctcttctgctgcatgtttttgcacgcctttgtgcgctggccccagagtcccatggatcgcaaccccaccatgaacttgctcaagggagtgcccaacgccatgctccagagcccccaggtccagcccaccctgcgccacaaccaggaacagctctaccgcttcctggagcgccactccccctacttccgcagtcacagcgcgcacatccggggggccacctctttctgccacttgcaacaaaacatgcaagacggaaaatgatgtacagctcgctttttaataaatgtaaagactgtgcactttatttatacacgggctctttctggttatttattcaacaccgccgtcgccatctagaaatcgaaagggttctgccgcgcgtcgccgtgcgccacgggcagagacacgttgcgatactggaagcggctcgcccacttgaactcgggcaccaccatgcggggcagtggctcctcggggaagttctcgccccacagggtgcgggtcagctgcagcgcgctcaggaggtcgggagccgagatcttgaagtcgcagttggggccggaaccctgcgcgcgcgagttgcggtacacggggttgcagcactggaacaccagcagggccggattacgcacgctggccagcaggctctcgtcgctgatcatgtcgctgtccagatcctccgcgttgctcagggcgaatggggtcatcttgcagacctgcctgcccaggaaaggcggcagcccgggcttgccgttgcagtcgcagcgcaggggcatcagcaggtgcccgtggcccgtctgcgcctgcgggtacagcgcgcgcatgaaggcttcgatctgcctgaaagccacctgcgtcttggctccctccgaaaagaacatcccacaggacttgctggagaactggttcgcgggacagctggcatcgtgcaggcagcagcgcgcgtcggtgttggcgatctgcaccacgttgcgaccccaccggttcttcactatcttggccttggaagcctgctccttcagcgcgcgctggccgttctcgctggtcacatccatctctatcacctgctccttgttgatcatgtttgtcccgtgcagacacttcaggtcgccctccgtctgggtgcagcggtgctcccacagcgcgcaaccggtgggctcccaatttttgtgggtcacccccgcgtaggcctgcaggtaggcctgcaagaagcgccccatcatggccacaaaggtcttctggctcgtaaaggtcagctgcaggccgcgatgctcttcgttcagccaggtcttgcagatggcggccagcgcctcggtctgctcgggcagcatcctaaaatttgtcttcaggtcgttatccacgtggtacttgtccatcatggcgcgcgccgcctccatgcccttctcccaggcggacaccatgggcaggcttagggggtttatcacttccaccggcgaggacaccgtactttcgatttcttcttcctccccctcttcccggcgcgcgcccacgctgctgcgcgctctcaccgcctgcaccaaggggtcgtcttcaggcaagcgccgcaccgagcgcttgccgcccttgacctgcttaatcagcaccggcgggttgctgaagcccaccatggtcagctccgcctgctcttcttcgtcttcgctgtctaccactatctctggggaagggcttctccgctctgcggcggtgcgcttcttttttttcttgggagcagccgtgacggagtccgccacggcgacggaggtcgagggcgtggggctgggggtgcgcggtaccagggcctcgtcgccctcggactcttcctctgactccaggcggcggcggagacgcttctttgggggcgcgcgcgtcagcggcggcggagacggggacggggacggggacgggacgccctccacagggggtggtcttcgcgcagacccgcggccgcgctcgggggtcttttcgagctggtcttggtcccgactggccattgtatcctcctcctcctaggcagagagacataaggagtctatcatgcaagtcgagaaggaggagagcttaaccaccccctctgagaccgccgatgcgcccgccgtcgccgtcgcccccgctgccgccgacgcgcccgccacaccgagcgacacccccgcggaccccccagccgacgcacccctgttcgaggaagcggccgtggagcaggacccgggctttgtctcggcagaggaggatttgcgagaggaggaggataaggagaagaagccctcagtgccaaaagatgataaagagcaagacgagcacgacgcagatgcacaccagggtgaagtcgggcggggggacggagggcatgacggcgccgactacctagacgaagggaacgacgtgctcttgaagcacctgcatcgtcagtgcgccatcgtttgcgacgctctgcaggagcgcagcgaagtgcccctcagcgtggcggaggtcagccacgcctacgagctcagcctcttctccccccgggtgcccccccgccgccgcgaaaacggcacatgcgagcccaacccgcgcctcaacttctaccccgcctttgtggtgcccgaggtcctggccacctatcacatcttctttcaaaattgcaagatccccctctcgtgccgcgccaaccgtagccgcgccgataagatgctggccctgcgccagggcgaccacatacctgatatcgccgctttggaagatgtgccaaagatcttcgagggtctgggtcgcaacgagaagcgggcagcaaactctctgcaacaggaaaacagcgaaaatgagagtcacaccggggtactggtggagctcgagggcgacaacgcccgcctggcggtggtcaagcgcagcatcgaggtcacccactttgcctaccccgcgctcaacctgccccccaaagtcatgaacgcggccatggacgggctgatcatgcgccgcggccggcccctcgctccagatgcaaacttgcatgaggagaccgaggacggccagcccgtggtcagcgacgagcagctggcgcgctggctggagaccgcggaccccgccgaactggaggagcggcgcaagatgatgatggccgcggtgctggtcaccgtagagctggagtgtctgcagcgcttcttcggcgaccccgagatgcagagaaaggtcgaggagaccctgcactacaccttccgccagggctacgtgcgccaggcttgcaagatctccaacgtggagctcagcaacctggtgtcctacctgggcatcttgcatgagaaccgcctcgggcagagcgtgctgcactccaccctgcgcggggaggcgcgccgcgactacgtgcgcgactgcgtttacctcttcctctgctacacctggcagacggccatgggggtctggcagcagtgcctggaggagcgcaacctcaaggagctggagaagctcctgcagcgcgcgctcaaagacctctggacgggctacaacgagcgctcggtggccgccgcgctggccgacctcatcttccccgagcgcctgctcaaaaccctccagcaggggctgcccgacttcaccagccaaagcatgttgcaaaacttcaggaactttatcctggagcgttctggcatcctacccgccacctgctgcgccctgcccagcgactttgtccccctcgtgtaccgcgagtgccccccgccgctgtggggtcactgctacctgttccaactggccaactacctgtcctaccacgcggacctcatggaggactccagcggcgaggggctcatggagtgccactgccgctgcaacctctgcacgccccaccgctccctggtctgcaacacccaactgctcagcgagagtcagattatcggtaccttcgagctacagggtccgtcctcctcagacgagaagtccgcggctccggggctaaaactcactccggggctgtggacttccgcctacctgcgcaaatttgtacctgaagactaccacgcccacgagatcaggttttacgaagaccaatcccgcccgcccaaggcggagctgaccgcctgcgtcatcacccagggcgagatcctaggccaattgcaagccatccaaaaagcccgccaagattttttgctgagaaagggtcggggggtgtatctggacccccagtcgggtgaggagctcaacccggttcccccgctgccgccgccgcgggaccttgcttcccaggataagcatcgccatggctcccagaaagaagcagcagcggccgccactgccgccaccccacatgctggaggaagaggaggaatactgggacagtcaggcagaggaggtttcggacgaggaggagccggagacggagatggaagagtgggaggaggacagcttagacgaggaggcttccgaagccgaagaggcagacgcaacaccgtcaccctcggccgcagccccctcgcaggcgcccccgaagtccgctcccagcatcagcagcaacagcagcgctataacctccgctcctccaccgccgcgacccacggccgaccgcagacccaaccgtagatgggacaccaccggaaccggggccggtaagtcctccgggagaggcaagcaagcgcagcgccaaggctaccgctcgtggcgcgctcacaagaacgccatagtcgcttgcttgcaagactgcggggggaacatctccttcgcccgccgcttcctgctcttccaccacggtgtggccttcccccgtaacgtcctgcattactaccgtcatctctacagcccctactgcggcggcagtgagccagagacggtcggcggcggcggcggcgcccgtttcggcgcctaggaagacccagggcaagacttcagccaagaaactcgcggcggccgcggcgaacgcggtcgcgggggccctgcgcctgacggtgaacgaacccctgtcgacccgcgaactgagaaaccgaatcttccccactctctatgccatcttccagcagagcagagggcaggatcaggaactgaaagtaaaaaacaggtctctgcgctccctcacccgcagctgtctgtatcacaagagcgaagaccagcttcggcgcacgctggaggacgctgaggcactcttcagcaaatactgcgcgctcactcttaaggactagctccgcgcccttctcgaatttaggcgggaacgcctacgtcatcgcagcgccgccgtcatgagcaaggacattcccacgccatacatgtggagctatcagccgcagatgggactcgcggcgggcgcctcccaagactactccacccgcatgaactggctcagtgccggcccacacatgatctcacaggttaatgatatccgcacccatcgaaaccaaatattggtggagcaggcggcaattaccaccacgccccgcaataatcccaaccccagggagtggcccgcgtccctggtgtatcaggaaattcccggccccaccaccgtactacttccgcgtgattcccaggccgaagtccaaatgactaactcaggggcgcagctcgcgggcggctgtcgtcacagggtgcggcctcctcgccagggtataactcacctggagatccgaggcagaggtattcagctcaacgacgagtcggtgagctcctcgctcggtctaagacctgacgggaccttccagatagccggagccggccgatcttccttcacgccccgccaggcgtacctgactctgcagagctcgtcctcggcgccgcgctcgggcggcatcgggactctccagttcgtgcaggagtttgtgccctcggtctacttcaaccccttctcgggctctcccggtcgctacccggaccagttcatctcgaactttgacgccgcgagggactcggtggacggctacgactgaatgtcgggtggacccggtgcagagcaacttcgcctgaagcacctcgaccactgccgccgccctcagtgctttgcccgctgtcagaccggtgagttccagtacttttccctgcccgactcgcacccggacggcccggcgcacggggtgcgctttttcatcccgagtcaggtgcgctctaccctaatcagggagtttaccgcccgtcccctactggcggagttggaaaaggggccttctatcctaaccattgcctgcatctgctctaaccctggattgcaccaagatctttgctgtcatttgtgtgctgagtataataaaggctgagatcagaatctactcgggctcctgtcgccatcctgtcaacgccaccgtccaagcccggcccgatcagcccgaggtgaacctcacctgcggtctgcaccggcgcctgaggaaatacctagcttggtactacaacagcactccctttgtggtttacaacagctttgaccaggacggggtctcactgagggataacctctcgaacctgagctactccatcaggaagaacagcaccctcgagctacttcctccttacctgcccgggacttaccagtgtgtcaccggtccctgcacccacacccacctgttgatcgtaaacgactctcttccgagaacagacctcaataactcctcttcgcagttccccagaacaggaggtgagctcaggaaaccccgggtaaagaagggtggacaagagttaacacttgtggggtttctggtgtatgtgacgctggtggtggctcttttgattaaggcttttccttccatgtctgaactctccctcttttatgaacaactcgactagtgctaacgggaccctacccaacgaatcgggattgaatatcggtaaccaggttgcagtttcacttttgattaccttcatagtcctcttcctgctagtgctgtcgcttctgtgcctgcggatcgggggctgctgcatccacgtttatatctggtgctggctgtttagaaggttcggagaccatcgcaggtagaataaacatgctgctgcttaccctctttgtcctggcgctggccgccagctgccaagccttttccgaggctgactttatagagccccagtgtaacgtgacttttaaagcccatgcacagcgttgtcatactataatcaaatgtgccaccgaacacgatgaataccttatccagtataaagataaatcacacaaagtggcacttgttgacatctggaaacccgaagaccctttggaatacaatgtgaccgttttccagggtgacctcttcaaaatttacaattacactttcccatttgaccagatgtgtgactttgtcatgtacatggaaaagcagcacaagctgtggcctccgactccccagggctgtgtggaaaatccaggctctttctgcatgatctctctctgtgtaactgtgctggcactaatactcacgcttttgtatatcagatttaaatcaaggcaaagcttcatcgatgaaaagaaaatgccttaaacgctttcacgcttgattgctaacaccgggtttttatccgcagaatgattggaatcaccctactaatcacctccctccttgcgattgcccatgggttggaacgaatcgaagcccctgtgggggccaatgttaccctggtggggcctgtcggcaatgctacattaatgtgggaaaaatatactaaaaatcaatgggtctcttactgcactaacaaaaacagccacaagcccagagccatctgcgatgggcaaaatctaaccttgattgatgttcaaatgctggatgcgggctactattatgggcagctgggtacaatgattaattactggagaccccacaaagattacatgctccacgtagtaaagggtccccttagcagcccacccactaccacctctactacccccactaccaccactactcccaccaccagcactgccgcccagcctcctcatagcagaacaaccacttttatcaattccaagtcccactccccccacattgccggcgggccctccgcctcagactccgagaccaccgagatctgcttctgcaaatgctctgacgcctttgctgaggatttggaagaccacgaggaagatgagcatgacttcgcagatgcatgccaggcatcagaggcagaagcgctgccggtggccctcaaacagtatgcagacccccacaccacccccaaccttcctccaccttcccagaagccaagtttcctgggggaaaatgaaactctgcctctctccatactcgctctgacatctgttgctatgttgaccgctctgctggtgcttctatgctctatatgctacctgatctgctgcagaaagaaaaaatctcacggccatgctcaccagcccctcatgcacttcccttaccctccagagctgggcgaccacaaactttaagtctgcagtaactatctgcccatcccttgtcagtcgacagcgatgagccccactaatctaacggcctctggacttacaacatcgtctcttaatgagaccaccgctcctcaagacctgtacgatggtgtctccgcgctggttaaccagtgggatcacctgggcatatggtggctcctcataggagcagtgaccctgtgcctaatcctggtctggatcatctgctgcatcaaaagcagaagacccaggcggcggcccatctacaggccctttgtcatcacacctgaagatgatgatgacaccacttccaggctgcagaggctaaagcagctactcttctcttttacagcatggtaaattgaatcatgcctcgcattttcatctacttgtctctccttccactttttctgggctcttctacattggccgctgtgtcccacatcgaggtagactgcctcacgcccttcacagtctacctgcttttcggctttgtcatctgcacctttgtctgcagcgttatcactgtagtgatctgcttcatacagtgcatcgactacgtctgcgtgcgggtggcttactttagacaccacccccagtatcgcaacagggacatagcggctctcctaagacttgtttaaaatcatggccaaattaactgtgattggtcttctgatcatctgctgcgtcctagccgcgattgggactcaagctcctaccaccaccagcgctcccagaaagagacatgtatcctgcagcttcaagcgtccctggaatataccccaatgctttactgatgaacctgaaatctctttggcttggtacttcagcgtcaccgcccttcttatcttctgcagtacggttattgcccttgccatctacccttcccttgacctgggctggaatgctgtcaactctatggaatatcccaccttcccagaaccagacctgccagacctggttgttctaaacgcgtttcctcctcctgctcccgttcaaaatcagtttcgccctccgtcccccacgcccactgaggtcagctactttaatctaacaggcggagatgactgaaaacctagacctagaaatggacggtctctgcagcgagcaacgcacactagagaggcgccggcaaaaagagctcgagcgtcttaaacaagagctccaagacgcggtggccatacaccagtgcaaaaaaggtgtcttctgtctggtaaaacaggccacgctcacctatgaaaaaacaggtgacacccaccgcctaggatacaagctgcccacacagcgccagaagttcgccctcatgataggcgaacaacccatcaccgtgacccagcactccgtggagacagaaggctgcatacacgctccctgtaggggcgctgactgcctctacaccttgatcaaaaccctctgcggtctcagagacctcatcccttttaattaatcataactgtaatcaataaaaaatcacttacttgaaatctgatagcaagcctctgtccaattttttcagcaacacttccttcccctcctcccaactctggtactctaggcgcctcctagctgcaaacttcctccacagtctgaagggaatgtcagattcctcctcctgtccctccgcacccacgatcttcatgttgttgcagatgaaacgcgcgagatcgtctgacgagaccttcaaccccgtgtacccctacgataccgagatcgctccgacttctgtccctttccttacccctccctttgtgtcatccgcaggaatgcaagaaaatccagctggggtgctgtccctgcacttgtcagagccccttaccacccacaatggggccctgactctaaaaatggggggcggcctgaccctggacaaggaagggaatctcacttcccaaaacatcaccagtgtcgatccccctctcaaaaaaagcaagaacaacatcagccttcagaccgccgcacccctcgccgtcagctccggggccctaacactttttgccactccccccctagcggtcagtggtgacaaccttactgtgcagtctcaggcccctctcactttggaagactcaaaactaactctggccaccaaaggacccctaactgtgtccgaaggcaaacttgtcctagaaacagaggctcccctgcatgcaagtgacagcagcagcctgggccttagcgttacggccccacttagcattaacaatgacagcctaggactagacatgcaagcgcccattagctctcgagatggaaaactggctctaacagtggcggcccccctaactgtggtcgagggtatcaatgctttggcagtagccacaggtaagggtattgggctaaatgaaaccaacacacacctgcaggcaaaactggtcgcacccctaggctttgataccaacggcaacattaagctaagcgttgcaggaggcatgaggctaaacaataacacactgatactagatgtaaactacccatttgaggctcaaggccaactgagcctaagagtgggctcgggcccactatatgtagattctagtagtcataacctaaccattagatgccttaggggattgtatataacatcttctaacaaccaaaacggtctagaagccaacattaaactaacaagaggccttgtgtatgacggaaatgccatagcagttaatgttggcaaagggctggaatacagccctactgacacaacagaaaaacctatacagactaaaataggtctaggcatggagtatgataccgagggagccatgatgacaaaactaggctctggactaagctttgacaattcaggagccattgtagtgggaaacaaaaatgatgacaggcttactttgtggaccacaccggacccatcgcccaactgtcagatctactctgaaaaagatgctaaactaaccttggtactgactaaatgtggcagtcaggttgtaggcacagtatctattgccgctcttaaaggtagcctcgtgccaatcactagtgcaatcagtgtggttcaggtatacctaaggtttgatgaaaatggggtactaatgagtaactcttcacttaatggcgaatactggaattttagaaacggagactcaactaatggcacaccatatacaaacgcagtgggtttcatgcctaatctactggcctatcctaaaggtcaaactacaactgcaaaaagtaacattgtcagccaggtctacatgaatggggacgatactaaacccatgacatttacaatcaacttcaatggccttagtgaaacaggggatacccctgttagtaaatattccatgacattctcatggaggtggccaaatggaagctacatagggcacaattttgtaacaaactcctttaccttctcctacatcgcccaagaataaagaaagcacagagatgcttgtttttgatttcaaaattgtgtgcttttatttattttcagcttacagtatttccagtagtcattcaaataaagcttaatcaaactgcatgagaacccttccacatagcttaaattagcaccagtgcaaatggagaaaaatcaacatacctttttttatccagatatcagagaactctagtggtcagttttcccccaccctcccagctcacagaatacacagtcctttccccccggctggctttaaacaacactatctcattggtaacagacatattcttaggtgtaataatccacacggtctcttggcgggccaaacgctggtcggtgatgttaataaactccccaggcagctctttcaagttcacgtcgctgtccaactgctgaagcgctcgcggctccgactgcgcctctagcggaggcaacggcaacacccgatccttgatctataaaggagtagagtcataatcccccataagaatagggcggtgatgcagcaacaaggcgcgcagcaactcctgccgccgcctctccgtacggcaggaatgcaacggcgtggtggtctcctccgtgataatccgcaccgctcgcagcatcagcatcctcgtcctccgggcacagcagcgcatcctgatctcactgagatcggcgcagtaagtgcagcacaaaaccaagatgttatttaagatcccacagtgcaaagcactgtacccaaagctcatggcgggaaggacagcccccacgtgaccatcataccagatcctcaggtaaatcaaatgacgacctctcataaacacgctggacatgtacatcacctccttgggcatgtgctgattcaccacctctcgataccacaagcatcgctgattaattaaagacccctcgagcaccatcctaaaccaggaagccagcacctgaccccccgccaggcactgcagggaccccggtgaatcgcagtggcagtgaagactccagcgctcgtagccgtgaaccatagagctggtcattatatccacattggcacaacacagacacactttcatacactttttcatgattagcagctcctctctagtcaggaccatatcccaaggaatcacccactcttgaatcaaggtaaatcccacacagcagggcaggcctctcacataactcacgttatgcatagtgagcgtgtcgcaatctggaaataccggatgatcttccatcaccgaagcccgggtctccgtctcaaagggaggtaaacggtccctcgtgtagggacagtggcgggataatcgagatcgtgttgaacgtagagtcatgccaaagggaacagcggacgtactcatatttcctccagcagaaccaagtgcgcgcgtggcagctatccctgcgtcttctgtctcgccgcctgccccgttcggtgtagtagttgtaatacagccactccctgagaccgtcaaggcgctccctggcgtccggatctatgacaacaccgtcctgcagcgccgccctgatgacatccaccaccgtagagtatgccaagcccagccaggaaatgcattcactttgacagcgagagataggaggagcggggagagatggaagaaccatgatagtaaagagaacttttattccaatcgatcttctaagatatcaaagtggagatctataagatgacactggtctcctccgctgagtcgatcaaaaataacagctaaaccacaaacaacacgattggtcaaatgctccacaagggcctgcagcataaaattgcctcggaactccaccgcaagcataacatcaaagccaccgcctctatcgtgatcaagaataaaaaccccacagctatccaccagacccatatagttttcatctctccatcgtgaaaaaagatttacaagctcctcctttaaatcacctccaaccaattgaaaaagttgaaccagaccgccctccaccttcattttcagcaagcgtatcatgattgcaaaaattcaggctcctcagacacctgtataagattgagaagcggaacgttaacatcgatgtttcgctcgcgtaaatcacgcctcagtgcaagcataatataatcccacaggtcggagcggatcagcgaggacacctccccgccaggaaccaactcaacggagcctatgctgattataatacgcatattcggagctatgctaaccagcacggcccccaaataggcgtactgcataggcggcgacaaaaagtgaacagtttgggttaaaaaatcaggcaaacactcgcgcaaaaaagcaagaacatcataaccatgctcatgcaaatagatgcaagtaagctcaggaacaaccacagaaaaatgcacaatttttctctcaaacatgactgcgagccctgcaaaaaataaaaaagaaacattacacaagagtagcctgtcttacgatgggatagactactctaaccaacataagacgggccacaacatcgcccgcgtggccataaaaaaaattgtccgtgtgattaaaaagaagcacagatagctggccagtcatatccggagtcatcacgtgtgaacccgtgtagacccccgggttggacacatcggccaaagaaagaaagcggccaatgtacccaggaggaattataacactaagacgaagatacaacagaataaccccatgagggggaataacaaagttagtaggtgaataaaaacgataaacacccgaaactccctcctgcgtaggcaaaatagcaccctccccttccaaaacaacatatagcgcttccacagcagccatgacaaaagactcaaaacactcaaaagactcagtcttaccaggaaaataaaagcactctcacagcaccagcactaatcagagtgtgaagagggccaagtgccgaacgagtatatataggaataaaaaatgacgtaaatgtgtaaaggtcagaaaacgcccagaaaaatacacagaccaacgcccgaaacgaaaacccgcgaaaaaatacccagaacttcctcaacaaccgccacttccgctttctcacggtacgtcacttccgcaagaaaagcaaaactacatttcccacatgtgtaaaaacgaaaccccgccccttgtaaccgcccacaacttacatcatcaaaacgtaaactcctacgtcacccgccccgcctctccccgcccacctcattatcatattggccacaatccaaaataaggtatattattgatgatg

SEQ ID NO: 80 - DNA, 37213 bp, Gorilla beringei graueri
catcatcaataatataccttattttggattgtggccaatatgataatgaggtgggcggggagaggcggggcgggtgacgtaggacgcgcgagtagggttgggaggtgtggcggaagtgtggcatttgcaagtgggaggagctcacatgcaagcttccgtcgcggaaaatgtgacgtttttgatgagcgccgcctacctccggaagtgccaattttcgcgcgcttttcaccggatatcgtagtaattttgggcgggaccatgtaagatttggccattttcgcgcgaaaagtgaaacggggaagtgaaaactgaataatagggcgttagtcatagtgcgtaatatttaccgagggccgagggactttgaccgattacgtggaggactcgcccaggtgttttttacgtgaatttccgcgttccgggtcaaagtctccgttttattgtcaccgtcatttgacgcggagggtatttaaacccgctgcgctcctcaagaggccactcttgagtgccagcgagaagagttttctcctctgctccgcttcggtgatcgaaaaatgagacacatagcctgcactccgggtcttttgtccggtcgggcggcggccgagcttttggacgctttgatcaatgatgtcctgagcgatgattttccgtctactacccactttagcccacctactcttcacgaactgtacgatctggatgtactggtggatgtgaacgatcccaacgaggaggcggtttctgcgttttttcccgagtctgcgctgttggccgctcaggagggatttgacctacacactccgccgcctattttagagtctccgctgccggagcccagtggtataccttatatgcctgaactgcttcccgaagtggtagacctgacctgccacgagcctggctttccgcccagcgacgatgatggtgagccttttgttttagactttgctgagatacctgggcacggttgcaggtcttgtgcatatcatcagagggttaccggagaccccgaggttaagtgttcgctgtgctatatgaggatgacctcttcctttatctacagtaagtttttgtctaggtgggcttttgggtaggtgggttttgtgtcagaacaggtgtaaacgttgcttgtgttttttgtacctgtaggtccggtgtccgagccagacccggagcccgaccgcgatcccgagccggatcccgagcctcctcgtagggcaagaaaattaccttctattctgtgcaagtctaagacacctgtgaggaccagcgaggcggacagcaccgactctggcacttctacctctcctcctgaaattcacccagtggttcctctgggtatacatagacctgttgctgttagagtttgcgggcgacgctctgcagtagagtgcattgaggacttgcttcacgaacccgaggaacctttggacttgagcgttaaacgccctaggcaataaaccccacctaagtaataaaccccacctaagtaataaaccctgccgcccttggttattgagatgacgcccaatgtttgcttttgaatgacttcatgtgtgtaataaaagtgagtgtgatcataggtctcttgtttgtctgggcggggcttaagggtatataagtctcttggggctaaacttggttacacttgaccccaatggaggcgtgggggtgcttggaggagtttgcggacgtgcgccgtttgctggacgagagctctagcaatacctatactatttggaggtatctgtggggctctactcaggccaagttggtctccagaattaagcaggattacaagtgcgattttgaagagctttttagttcctgcggtgagcttttgcaatccttgaatctgggccatcaggctattttccaggaaaaggttctctcgactttggatttttccactcccgggcgcaccgccgcttgtgtggcttttgtgtcttttgtgcaagataaatggagcgaggagacccacctgagtcacggctacgtactggatttcatggcgatggctctttggagggcttacaacaaatggaagattcagaaggaactgtacggttccgccctacgtcgtccacttctgtcgcgacaggggctgaggtttcccgaccatcggcagcatcagaatctggaagacgagtcggaggagcgagcggaggagaagatcagcttgagagccggcctggaccctcctcaggaggaatgaatctcccgcaggtggttgacctgtttccagaactgagacgggtcctgactatcagggaggatggtcagtttgtgaagaagtttaagagggatcggggtgagggagatgatgaggcggctagcaatttagcttttagtctgatgactcgccaccgaccggaatgtattacctatcagcagattaaggagagttgtgccaacgagctggatcttttgggtcagaagtatagcatagaacagcttaccacttactggcttcagcctggggatgattgggaagaggcgatcagggtgtatgcaaaggtggccctgcggcccgattgcaagtataagattactaagttggttaatattagaaactgctgctatatttctgggaacggggccgaagtggagatagatactcaggacagggtggcttttaggtgttgcatgataaacatgtggcccgggatactggggatggatggggtggtattcatgaatgtgaggtttacgggccccaactttaatggcacggtgttcatgggcaacaccaacttgctcctgcatggtgcgagtttctatgggtttaataacacctgtatagaggcctggaccgatgtaaaggttcgaggttgttccttttatagctgttggaaggcggtggtgtgtcgccctaaaagcaggggttctgtgaaaaaatgcttgtttgaaaggtgcaccttaggcatcctctctgagggcaactccagggtgcgccataatgtggcttcgaactgcggttgcttcatgcaagtgaagggggtgagcgttatcaagcataactcggtgtgtggaaactgcgaggatcgcgcctcccagatgctgacctgctttgatggcaactgtcacctgttgaagaccattcatataagcagccaccccagaaaggcctggcccgtgtttgagcataacatcttgacccgctgctccttgcatctgggggtcaggaggggtatgttcctgccttaccagtgtaactttagccacactaaaatcctgctggaacccgagtgcatgaccaaggtcagcctgaatggtgtgtttgatgtgactctgaaaatctggaaggtgctgaggtatgatgagaccaggaccaggtgccgaccctgcgagtgcggcggcaagcacatgagaaatcagcctgtgatgttggatgtgaccgaggagcttaggcctgaccatctggtgctggcctgcaccagggccgagtttgggtctagcgatgaggataccgattgaggtgggtaaggtgggcgtggctagaagggtggggcgtgtataaattgggggtctaagggtctctctgttttgtcttgcaacagccgccgccatgagcgacaccggcaacagctttgatggaagcatctttagcccctatctgacagtgcgcatgcctcactgggctggagtgcgtcagaatgtgatgggttccaacgtggatggacgccccgttctgccttcaaattcgtctacaatggcctacgcgaccgtgggaggaactccgctggacgccgcgacctccgccgccgcctccgccgccgccgcgaccgcgcgcagcatggctacggacctttacagctctttggtggcgagcggcgcggcctctcgcgcgtctgctcgggatgagaaactgaccgctctgctgcttaaactggaagacttgacccgggagctggctcaactgacccagcaggtctccagcttgcgtgagagcagccttgcctccccctaatggcccataatataaataaaagccagtctgtttggattaagcaagtgtatgttctttatttaactctccgcgcgcggtaagcccgggaccagcggtctcggtcgtttagggtgcggtggattctttccaacacgtggtacaggtggctctggatgtttagatacatgggcatgagtccatccctggggtggaggtagcaccactgcagagcttcgtgctcgggggtggtgttgtatatgatccagtcgtagcaggagcgctgggcgtggtgctgaaaaatgtccttaagcaagaggcttatagctagggggaggcccttggtgtaagtgtttacaaatctgctcagttgggaggggtgcatccggggggatataatgtgcatcttggactggatttttaggttggctatgttcccacccagatcccttctgggattcatgttgtgcaggaccaccagcacggtatatccagtacacttgggaaatttatcgtggagcttagacgggaatgcatggaagaacttggagacgcccttgtggcctcccagattttccatacattcgtccatgatgatggcaatgggcccgtgggaagctgcctgagcaaaaatgtttctgggatcgctcacatcgtagttatgttccagggtgaggtcatcataggacatctttacaaatcgggggcggagggtcccggactgggggatgatggtgccctcgggccccggggcgtagttcccctcacagatctgcatctcccaggctttcatttcagagggagggatcatatccacctgcggagcgatgaaaaacacagtttctggcgcaggggagattaactgggatgagagcaggtttctgagcagctgtgactttccacagccggtgggcccatatatcacgcctatcaccggctgcagctggtagttaagagagctgcagctgccgtcctcccggagcaggggggccacctcgttcagcatatccctgacgtggatgttctccctgaccaattccgccagaaggcgctcgccgcccagcgaaagcagctcttgcaaggaagcaaaatttttcagcggttttaggccgtcggccgtgggcatgtttttcagcgtctgggtcagcagttccagtctgtcccacagctcggtgatgtgctctacggcatctcgatccagcagatctcctcgtttcgcgggttggggcggctttcgctgtagggcaccagccgatgggcgtccagcggggccagagtcatgtccttccatgggcgcagggtcctcgtcagggtggtctgggtcacggtgaaggggtgcgctccgggttgggcgctggccagggtgcgcttgaggctggttctgctggtgctgaatcgctgccgctcttcgccctgcgcgtcggccaggtagcatttgaccatggtctcgtagtcgagaccctcggcggcgtgccccttggcgcggagctttcccttggaggtggcgccgcacgaggggcactgcaggctcttcagggcgtagagcttgggagcgagaaacacggactctggggagtaggcgtccgcgccgcaggaagcgcagaccgtctcgcattccaccagccaagtgagctccgggcggtcagggtcaaaaaccaggttgcccccatgctttttgatgcgtttcttacctcggctctccatgaggcggtgtcccttctcggtgacgaagaggctgtccgtgtctccgtagaccgacttcaggggcctgtcttccagcggagtgcctctgtcctcctcgtagagaaactctgaccactctgagacgaaggcccgcgtccaggccaggacgaaggaggccacgtgggaggggtagcggtcgttgtccactagcgggtccaccttctccagggtgtgcaggcacatgtccccctcctccgcgtccagaaaagtgattggcttgtaggtgtaggacacgtgaccgggggttcccgacgggggggtataaaagggggtgggcaccctttcatcttcactctcttccgcatcgctgtctgcgagagccagctgctggggtaagtattccctctcgaaggcgggcatgacctcagcgctcaggttgtcagtttctaaaaatgaggaggatttgatgttcacctgtccggaggtgatacctttgagggtacctgggtccatctggtcagaaaacactatttttttgttgtcaagcttggtggcgaacgacccgtagagggcgttggagagcagcttggcgatggagcgcagggtctggtttttgtcgcggtcggctcgctccttggccgcgatgttgagttgcacgtactcgcgggccacgcacttccactcggggaagacggtggtgcgctcgtctgggatcaggcgcaccctccagcctcggttgtgcagggtgaccatgtcgacgctggtggcgacctcgccgcgcaggcgctcgttggtccagcagaggcggccgcccttgcgcgagcagaaggggggtagggggtccagctggtcctcgtttggggggtccgcgtcgatggtgaagaccccggggagcaagcgcgggtcaaagtagtcgatcttgcaagcttgcatgtccagagcccgctgccattcgcgggcggcgagcgcgcgctcgtaggggttgaggggcgggccccagggcatggggtgggtgagcgcggaggcgtacatgccgcagatgtcatacacgtacaggggttccctgaggatgccgaggtaggtggggtagcagcgccccccgcggatgctggcgcgcacgtagtcatagagctcgtgggagggggccagcatgttgggcccgaggttggtgcgctgggggcgctcggcgcggaaggcgatctgcctgaagatggcatgggagttggaggagatggtgggccgctggaagacgttgaagcttgcttcttgcaagcccaccgagtccctgacgaagcaggcgtaggactcgcgcagcttgtgcaccagctcggcggtgacctggacgtcgagcgcgcagtagtcgagggtctcgcggatgatgtcatacttatcctcccccttctttttccacagctcgcggttgaggacgaactcttcgcggtctttccagtactcttggaggggaaacccgtccgtgtccgaacggtaagagcctagcatgtagaactggttgacggcctggtaggggcaacagcccttctccacgggcagcgcgtaggcctgcgccgccttgcggagggaggtgtgggtgagggcgaaagtgtccctgaccatgactttgaggtattgatgtttgaagtctgtgtcatcgcagccgccctgttcccacagggtgtagtccgtgcgctttttggagcgcgggttgggcagggagaaggtgaggtcattgaagaggatcttccccgctcgaggcatgaagtttctggtgatgcgaaagggccctgggaccgaggagcggttgttgatgacctgggcggccaggacgatctcgtcaaagccgtttatgttgtggcccacgatgtagagctccaaaaagcggggctggcccttgatggaggggagctttttgagttcctcgtaggtgagctcctcgggcgattccaggccgtgctcctccagggcccagtcttgcaagtgagggttggccgccaggaaggatcgccagaggtcgcgggccatgagggtctgcaggcggtcgcggaaggttctgaactgtcgccccacggccatcttttcgggggtgatgcagtagaaggtgagggggtctttctcccaggggtcccatctgagctctcgggcgaggtcgcgcgcggcggcgaccagagcctcgttgccccccagtttcatgaccagcatgaagggcacgagctgcttgccaaaggctcccatccaagtgtaggtctctacatcgtaggtgacaaagaggcgctccgtgcgaggatgagagccgatcgggaagaactggatctcccgccaccagttggaggattggctgttgatgtggtgaaagtagaagtcccgtctgcgggccgagcactcgtgctggcttttgtaaaagcgaccgcagtactggcagcgctgcacgggttgtatatcttgcacgaggtgaacctggcgacctctgacgaggaagcgcagcgggaatctaagtcccccgcctggggtcccgtgtggctggtggtcttctactttggttgtctggccgccagcatctgtctcctggagggcgatggtggagcagaccaccacgccgcgagagccgcaggtccagatctcggcgctcggcgggcggagtttgatgacgacatcgcgcacattggagctgtccatggtctccagctcccgcggcggcaggtcagctgggagttcctggaggttcacctcgcagagacgggtcaaggcgcgggcagtgttgagatggtatctgatttcaaggggcgtgttggcggcggagtcgatggcttgcaggaggccgcagccccggggggccacgatggttccccgcggggcgcgaggggaggcggaagctgggggtgtgttcagaagcggtgacgcgggcgggcccccggaggtagggggggttccggccccacaggcatgggcggcaggggcacgtcttcgccgcgcgcgggcaggggctggtgctggctccgaagagcgcttgcgtgcgcgacgacgcgacggttggtgtcctgtatctgacgcctctgagtgaagaccacgggtcccgtgaccttgaacctgaaagagagttcgacagaatcaatctcggcatcgttgacagcggcctggcgcaggatctcctgcacgtcgcccgagttgtcctggtaggcgatctctgccatgaactgctcgatctcttcttcctggagatctcctcgtccggcgcgctccacggtggccgccaggtcgttggagatgcgacccatgagctgcgagaaggcgttgagcccgccctcgttccagacccggctgtagaccacgcccccctcggcgttgcgggcgcgcatgaccacctgggccaggttgagctccacgtgtcgcgtgaagacggcgtagttgcgcaggcgctggaaaaggtagttcagggtggtggcggtgtgctcggcgacgaagaagtacatgacccagcgccgcaacgtggattcattgatgtcccccaaggcctccaggcgctccatggcctcgtagaagtccacggcgaagttgaaaaactgggagttgcgagcggacacggtcaactcctcctccagaagacggatgagctcggcgacagtgtcgcgcacctcgcgctcgaaggccacggggggcgcttcttcctcttccacctcttcttccatgatcgcttcttcttcttcctcagccgggacgggagggggcggcggcggcgggggaggggcgcggcggcggcggcggcgcaccgggaggcggtcgatgaagcgctcgatcatctccccccgcatgcggcgcatggtctcggtgacggcgcggccgttctcccgggggcgcagctcgaagacgccgcctctcatctcgccgcggggcgggcggccgtgaggtagcgagacggcgctgactatgcatcttaacaattgctgtgtaggtacaccgccgagggacctgattgagtccagatccaccggatccgaaaacctttggaggaaagcgtctatccagtcgcagtcgcaaggtaggctgagcaccgtggcgggcgggggcgggtctggagagttcctggcggagatgctgctgatgatgtaattaaagtaggcggtcttgagaaggcggatggtggacaggagcaccatgtctttgggtccggcctgttggatgcggaggcggtcggccatgccccaggcctcgttctgacaccggcgcaggtctttgtagtagtcttgcatgagtctttccaccggcacctcttctccttcctcttctccatctcgccggtggtttctcgcgccgcccatgcgcgtgaccccaaagcccctgagcggctgcagcagggccaggtcggcgaccacgcgctcggccaagatggcctgctgcacctgagtgagggtcctctcgaagtcatccatgtccacgaagcggtggtaggcgcccgtgttgatggtgtaggtgcagttggccatgacggaccagttgacggtctggtgtcccggctgcgagagctccgtgtaccgcaggcgcgagaaggcgcgggaatcgaacacgtagtcgttgcaagtccgcaccagatactggtagcccaccaggaagtgcggcggaggttggcgatagaggggccagcgctgggtggcgggggcgccgggcgccaggttttccagcatgaggcggtggtatccgtagatgtacctggacatccaggtgatgccggcggcggtggtggtggcgcgcgcgtagtcgcggacccggttccagatgtttcgcaggggcgagaagtgttccatggtcggcacgctctggccggtgaggcgcgcgcagtcgttgacgctctatacacacacaaaaacgaaagcgtttacagggctttcgttctgtagcctggaggaaagtaaatgggttgggttgcggtgtgccccggttcgagaccaagctgagctcggccggctgaagccgcagctaacgtggtattggcagtcccgtctcgacccaggccctgtatcctccaggatacggtcgagagcccttttgctttcttggccaagcgcccgtggcgcgatctgggatagatggtcgcgatgagaggacaaaagcggctcgcttccgtagtctggagaaacaatcgccagggttgcgttgcggcgtaccccggttcgagcccctatggcggcttgaatcggccggaaccgcggctaacgagggccgtggcagccccgtcctcaggaccccgccagccgacttctccagttacgggagcgagccccttttgttttttattttttagatgcatcccgtgctgcggcagatgcgcccctcgccccggcccgatcagcagcagcaacagcaggcatgcagacccccctctcccctttccgccccggtcaccacggccgcggcggccgtgtcgggcgcggggggcgcgctggagtcagatgagccaccgcggcggcgacctaggcagtatctggacttggaagagggcgagggactggcgcggctgggggcgaactctccagagcgccacccgcgggtgcagttgaaaagggacgcgcgcgaggcgtacctgccgcggcagaacctgtttcgcgaccgcgggggcgaggagcccgaggagatgcgagactgcaggttccaagcggggcgcgagctgcggcgcgggctggacagacagcgcctgctgcgcgaggaggactttgagcccgacacgcagacgggcatcagccccgcgcgcgcgcacgtagccgcggccgacctggtgaccgcctacgagcagacggtgaaccaggagcgcaacttccaaaagagcttcaacaaccacgtgcgcacgctggtggcgcgcgaggaggtgaccctgggtctcatgcatctgtgggacctggtggaggcgatcgtgcagaaccccagcagcaagcccctgaccgcgcagctgttcctggtggtgcagcacagcagggacaacgaggccttcagggaggcgctgctgaacatcaccgagccggaggggcgctggctcctggacctgataaacatcctgcagagcatagtggtgcaggagcgcagcctgagcctggccgagaaggtggcggccatcaactactctatgctgagcctgggcaagttctacgcccgcaagatctacaagaccccctacgtgcccatagacaaggaggtgaagatagacagcttctacatgcgcatggcgctgaaggtgctgaccctgagcgacgacctgggagtgtaccgcaacgagcgcatccacaaggccgtgagcgccagccggcggcgcgagctgagcgaccgcgagctgatgcacagtctgcagcgcgcgctgaccggcgcgggcgagggcgacagggaggtcgagtcctacttcgacatgggggccgacctgcactggcagccgagccgccgcgccctggaggcggcgggggcgtacggcggccccctggcggccgatgaccaggaagaggaggactatgagctagaggagggcgagtacctggaggactgacctggctggtggtgttttggtatagatgcaagatccgaacgtggcggacccggcggtccgggcggcgctgcaaagccagccgtccggcattaactcctctgacgactgggccgcggccatgggtcgcatcatggccctgaccgcgcgcaaccccgaggctttcaggcagcagcctcaggccaaccggctggcggccatcttggaagcggtagtgcccgcgcgctccaaccccacccacgagaaggtgctggccatagtcaacgcgctggcggagagcagggccatccgcgcggacgaggccggactggtgtacgatgcgctgctgcagcgggtggcgcggtacaacagcggcaacgtgcagaccaacctggaccgcctggtgacggacgtgcgcgaggccgtggcgcagcgcgagcgcttgcatcaggacggtaacctgggctcgctggtggcgctaaacgccttcctcagcacccagccggccaacgtaccgcgggggcaggaggactacaccaactttttgagcgcgctgcggctgatggtgaccgaggtccctcagagcgaggtgtaccagtcggggcccgactacttcttccagaccagcagacagggcttgcaaaccgtgaacctgagccaggctttcaagaacctgcgggggctgtggggagtgaaggcgcccaccggcgaccgggctacggtgtccagcctgctaacccccaactcgcgcctgctgctgctgctgatcgcgcccttcacggacagcgggagcgtctcgcgggagacctatctgggccacctgctgacgctgtaccgcgaggccatcgggcaggcgcaggtggacgagcacaccttccaagagatcaccagcgtgagccacgcgctggggcaggaggacacgggcagcctgcaggcgaccctgaactacctgctgaccaacaggcggcagaagattcccacgctgcacagcctgacccaggaggaggagcgcatcttgcgctacgtgcagcagagcgtgagcctgaacctgatgcgcgacggcgtgacgcccagcgtggcgctggacatgaccgcgcgcaacatggaaccgggcatgtacgcctcccaccggccgttcatcaaccgcctgatggactacttgcatcgggcggcggccgtgaaccccgagtacttcactaatgccattctgaatccccactggatgccccctccgggtttctacaacggggactttgaggtgcccgaggtcaacgacgggttcctctgggatgacatggatgacagtgtgttctcacccaacccgctgcgcgccgcgtctctgcgattgaaggagggctctgacagggaaggaccgagaagtctggcctcctccctggctctgggagcggtgggcgccacgggcgcggcggcgcggggcagtagccccttccccagcctggcagactctctgaacagcgggcgggtgagcaggccccgcttgctaggcgaggaggagtatctgaacaactccctgctgcagcccgcgagggacaagaacgctcagcggcagcagtttcccaacaatgggatagagagcctggtggacaagatgtccagatggaagacgtatgcgcaggagtacaaggagtgggaggaccgccagccgcggcccttgccgccccctaggcagcgctggcagcggcgcgcgtccaaccgccgctggaggcaggggcccgaggacgatgatgactctgcagatgacagcagcgtgttggacctgggcgggagcgggaaccccttttcgcacctgcgcccacgcctgggcaagatgttttaaaagaaaaaaaaaaaaataaaactcaccaaggccatggcgacgagcgttggttttttgttcccttccttagtatgcggcgcgcggcgatgttcgaggaggggcctcccccctcttacgagagcgcgatggggatttctcctgcggcgcccctgcagcctccctacgtgcctcctcggtacctgcaacctacaggggggagaaatagcatctgttactctgagctgcagcccctgtacgataccaccagactgtacctggtggacaacaagtccgcggacgtggcctccctgaactaccagaacgaccacagcgattttttgaccacggtgatccaaaacaacgacttcaccccaaccgaggccagcactcagaccataaacctggataacaggtcgaactggggcggcgacctgaagaccatcttgcacaccaacatgcccaacgtgaacgagttcatgttcaccaactcttttaaggcgcgggtgatggtggcgcgcgagcagggggaggcgaagtacgagtgggtggacttcacgctgcccgagggcaactactcagagaccatgactctcgacctgatgaacaatgcgatcgtggaacactatctgaaagtgggcaggcagaacggggtgaaggaaagcgatatcggggtcaagtttgacaccagaaacttccgtctgggctgggaccccgtgaccgggctggtcatgccgggggtctacaccaacgaggcctttcatcccgacatagtgcttctgcccggctgtggggtggacttcacccagagccggctgagcaacctgctgggcattcgcaagcggcagcctttccaggagggtttcaagatcacctatgaggatctgaaggggggcaacattcccgcgctccttgatctggacgcctacgaggagagcttgaaacccgaggagagcgctggcgacagcggcgagagtggcgaggagcaagccggcggcggtggcggcgcgtcggtagaaaacgaaagtacgcccgcagtggcggcggacgctgcggaggtcgagccggaggccatgcagcaggacgcagaggagggcgcacaggagggcgcgcagaaggacatgaacgatggggagatcaggggagacacattcgccacccggggcgaagaaaaagaggcagaggcggcggcggcggcgacggcggaggccgaaaccgaggttgaggcagaggcagagcccgagaccgaagttatggaagacatgaatgatggagaacgtaggggcgacacgttcgccacccggggcgaagagaaggcggcggaggcagaagccgcggctgaggaggcggctgcggctgcggccaagactgaggctgcggctaaggctgaggtcgaagccaatgttgcggttgaggctcaggctgaggaggaggcggcggctgaagcagttaaggaaaaggcccaggcagagcaggaagagaaaaaacctgtcattcaacctctaaaagaagatagcaaaaagcgcagttacaacgtcatcgagggcagcacctttacccagtaccgcagctggtacctggcgtacaactacggcgacccggtcaagggggtgcgctcgtggaccctgctctgcacgccggacgtcacctgcggctccgagcagatgtactggtcgctgccgaacatgatgcaagacccggtgaccttccgctccacgcggcaggttagcaacttcccggtggtgggcgccgaactgctgcccgtgcactccaagagtttttacaacgagcaggccgtctactcccagctgatccgccaggccacctctctgacccacgtgttcaatcgctttcccgagaaccagattttggcgcgcccgccggcccccaccatcaccaccgtgagtgaaaacgttcctgccctcacagatcacgggacgctaccgctgcgcaacagcatctcaggagtccagcgagtgaccattactgacgccagacgccggacctgcccctacgtttacaaggccttgggcatagtctcgccgcgcgtcctctccagtcgcactttttaaaacacatctacccacacgttccaaaatcatgtccgtactcatctcacccagcaacaacaccggctgggggctgcgcgcgcccagcaagatgtttggaggggcgaggaagcgctccgaccagcaccctgtgcgcgtgcgcggccactaccgcgcgccctggggagcgcacaagcgcgggcgcacagggcgcaccactgtggacgacgtcattgactccgtagtggagcaagcgcgccactacacacccggcgcgccgaccgcccccgccgtgtccaccgtggaccaggcgatcgaaagcgtggtacagggcgcgcggcactatgccaaccttaaaagtcgccgccgccgcgtggcccgccgccatcgccggagaccccgggccaccgccgccgcgcgccttactaaggctctgctcaggcgcgccaggcgaactggccaccgggccgccatgagggccgcacggcgggctgccgctgccgcaagcgccgtggccccgcgggcacgaaggcgcgcggccgccgccgccgccgccgccatttccagcttggcctcgacgcggcgcggtaacatatactgggtgcgcgactcggtaaccggcacgcgggtacccgtgcgctttcgccccccgcggaattagcacaagacaacatacacactgagtctcctgctgttgtgtatcccagcggcgaccgtcagcagcggcgacatgtccaagcgcaaaattaaagaagagatgctccaggtcatcgcgccggagatctatgggcccccgaagaaggaggaggatgattacaagccccgcaagctaaagcgggtcaaaaagaaaaagaaagatgatgatgatgacgaggcggtggagtttgtccgccgcatggcacccaggcgccccgtgcagtggaagggccggcgcgtgcagcgcgttttgcgccccggcaccgcggtggtcttcacgcccggcgagcgctccacgcgcactttcaagcgggtgtacgatgaggtgtacggcgacgaggacctgttggagcaggccaaccagcgctttggggagtttgcatatgggaaacggccccgcgagagtctaaaagaggacctgctggcgctaccgctggacgagggcaatcccaccccgagtctgaagccggtaaccctgcaacaggtgctgcctttgagcgcgcccagcgagcataagcgagggttgaagcgcgaaggcggggacctggcgcccaccgtgcagttgatggtgcccaagcggcagaagctggaggacgtgctggagaaaatgaaagtagagcccgggatccagcccgagatcaaggtccgccccatcaagcaggtggcgcccggcgtgggagtccagaccgtggacgttaggattcccacggaggagatggaaacccaaaccgccactccctcttcggcggccagcgccaccaccggcaccgcttcggtagaggtgcagacggacccctggctacccgccaccgctgttgccgccgccgccccccgttcgcgcgggcgcaagagaaattatccagcggccagcgcgctcatgccccagtacgcactgcatccatccatcgcgcccacccccggctaccgcgggtactcgtaccgcccgcgcagatcagccggcactcgcggccgccgccgccgtgcgaccacaaccagccgccgccgtcgccgccgccgccagccagtgctgacccccgtgtctgtaaggaaggtggctcgctcggggagcacgctggtggtgcccagagcgcgctaccaccccagcatcgtttaaagccggtctctgtatggttcttgcagatatggccctcacttgtcgcctccgcttcccggtgccgggataccgaggaagaactcaccgccgcagaggcatggcgggcagcggtctccgcggcggccgtcgccatcgccggcgcgcaaaaagcaggcgcatgcgcggcggtgtgctgcctctgctaatcccgctaatcgccgcggcgatcggtgccgtacccgggatcgcctccgtggccctgcaggcgtcccagaaacgttgactcttgcaaccttgcaagcttgcattttttggaggaaaaaataaaaaaagtctagactctcacgctcgcttggtcctgtgactattttgtagaaaaaagatggaagacatcaactttgcgtcgctggccccgcgtcacggctcgcgcccgttcatgggagactggacagatatcggcaccagcaatatgagcggtggcgccttcagctggggcagtctgtggagcggccttaaaaattttggttccaccattaagaactatggcaacaaagcgtggaacagcagcacgggccagatgctgagagacaagttgaaagagcagaacttccaggagaaggtggcgcagggcctggcctctggcatcagcggggtggtggacatagctaaccaggccgtgcagaaaaagataaacagtcatctggacccccgtcctcaggtggaggaaatgcctccagcgatggagacggtgtctcccgagggcaaaggcgaaaagcgcccgcggcccgacagagaagagaccctggtgtcacacaccgaggagccgccctcttacgaggaggcagtcaaggccggcctgcccaccactcgccccatagcccccatggccaccggtgtggtgggccacaggcaacacactcccgcaacactagatctgcccccgccgtccgagccgccgcgccagccaaaggcggcgacggtgcccgctccctccacttccgccgccaacagagtgcccctgcgccgcgccgcgagcggcccccgggcctcgcgagttagcggcaactggcagagcacactgaacagcatcgtgggcctgggagtgaggagtgtgaagcgccgccgttgctactgaatgagcaagctagctaacgtgttgtatgtgtgtatgcgtcctatgtcgccgccagaggagctgttgagccgccggcgccgtctgcactccagcgaatttcaagatggcgaccccatcgatgatgcctcagtggtcgtacatgcacatctcgggccaggacgcttcggagtacctgagccccgggctggtgcagttcgcccgcgccacagacacctacttcaacatgagtaacaagttcaggaaccccactgtggcgcccacccacgatgtgaccacggaccggtcgcagcgcctgacgctgcggttcatccccgtggatcgggaggacaccgcctactcttacaaggcgcggttcacgctggccgtgggcgacaaccgcgtgctggacatggcctccacttactttgacatcaggggggtgctggacaggggccccaccttcaagccctactcgggtactgcctacaactccctggcccccaagggcgctcccaattcttgcgagtgggaacaagaggaaaatcaggtggtcgctgcagatgatgaacttgaagatgaagaagcgcaagctcaagaggacgccccagctaaaaaaattcatgtatatgcccaggcgcctcttgctggcgaaaagattaccaaggatggtttgcaaataggtactgaagttgtaggagatacatctaaggacacttttgcagacaaaacattccaacccgaacctcagataggcgagtctcagtggaacgaggctgatgccacagtagcaggaggcagagtcttgaaaaaaaccacccctatgagaccttgctatggatcctatgccaggcctacaaatgccaacgggggtcaaggaattatggttgccaatgaacaaggagtgttggagtctaaagtggagatgcaatttttttctaacactacaacccttaatgcgcgggatggagctggcaatcccgaaccaaaggtggtgttgtacagtgaagatgtccacttggaatctcctgacactcatttgtcttacaagcccaaaaaggatgatgttaatgctaaaattatgttgggtcagcaagctatggctaacaggcccaacctcattgcttttagagataatttcattggactcatgtactacaacagcactggtaacatgggagtgctggcgggtcaggcctctcagttgaatgccgtggtggacctgcaggatagaaacacagaactgtcatatcagcttatgcttgattccattggggatagatccagatacttctccatgtggaaccaggcagtggatagctatgacccagatgtcagaatcattgaaaaccatggtgtcgaggacgagctacccaactactgcttccctctgggcggcataggaattactgatacttatcaagggatcaaaaataccaatggcaatggtcagtggaccaaagatgatcagttcgcggaccgtaatgaaataggggtgggaaacaacttcgccatggagatcaacatccaggccaacctctggaggaacttcctctatgcgaacgtggggctctacctgccagacaagctcaagtacaaccccaccaacgtggacatctctgacaaccccaacacctatgactacatgaacaagcgtgtggtggctcccggcctggtggactgctttgtcaatgtgggagccaggtggtccctggactacatggacaacgtcaaccccttcaaccaccaccgcaatgcgggtctgcgctaccgctccatgatcctgggcaacgggcgctacgtgcccttccacattcaggtgccccagaagttctttgccatcaagaacctcctcctcctgccgggctcctacacttacgagtggaacttcaggaaggatgtcaacatggtcctgcagagctctctgggcaatgaccttagggtggacggggccagcatcaagtttgacagcgtcaccctctatgctaccttcttccccatggctcacaacaccgcctccacgctcgaggccatgctgaggaacgacaccaacgaccagtccttcaatgactacctctctggggccaacatgctctaccccatccccgccaaggccaccaacgtgcccatctccattccctctcgcaactgggccgccttcagaggctgggcctttacccgccttaagaccaaggaaaccccctccctgggctcgggttttgacccctactttgtctactcgggatccatcccctacctggatggcaccttctacctcaaccacacttttaagaagatatccatcatgtatgactcctccgtcagctggccgggcaatgaccgcctgctcacccccaatgagttcgaggtcaagcgcgccgtggacggcgagggctacaacgtggcccagtgcaacatgaccaaggactggttcctggtgcagatgctggccaactacaacataggctaccagggcttctacatcccagagagctacaaggacaggatgtactccttcttcagaaatttccaacccatgagcaggcaggtggtggacgagaccaaatacaaggactatcaggccattggcatcactcaccagcacaacaactcgggattcgtgggctacctggctcccaccatgcgcgaggggcaggcctaccccgccaacttcccctacccgttgataggcaagaccgcggtcgacagcgtcacccagaaaaagttcctctgcgaccgcaccctctggcgcatccccttctctagcaacttcatgtccatgggtgcgctcacggacctgggccagaacctgctctatgccaactccgcccatgcgctggacatgacttttgaggtggaccccatggacgagcccacccttctctatattgtgtttgaagtgttcgacgtggtcagagtgcaccagccgcaccgcggtgtcatcgagaccgtgtacctgcgcacgcccttctcggccggcaacgccaccacctaaggagacagcgccgccgcctgcatgacgggttccaccgagcaagagctcagggccatcgccagagacctgggatgcggaccctattttttgggcacctatgacaaacgcttcccgggcttcatctcccgagacaagctcgcctgcgccatcgtcaacacggccgcgcgcgagaccgggggcgtgcactggctggcctttggctgggacccgcgctccaaaacctgctacctcttcgacccctttggcttctccgatcagcgcctcagacagatctatgagtttgagtacgaggggctgctgcgccgcagcgcgcttgcctcctcgcccgaccgctgcatcacccttgagaagtccaccgagaccgtgcaggggccccactcggccgcctgcggtctcttctgctgcatgtttttgcacgcctttgtgcgctggccccagagtcccatggatcgcaaccccaccatgaacttgctcaagggagtgcccaacgccatgctccagagcccccaggtccagcccaccctgcgccacaaccaggaacagctctaccgcttcctggagcgccactccccctacttccgcagtcacagcgcgcacatccggggggccacctctttctgccacttgcaacaaaacatgcaagacggaaaatgatgtacagctcgctttttaataaatgtaaagactgtgcactttatttatacacgggctctttctggttatttattcaacaccgccgtcgccatctagaaatcgaaagggttctgccgcgcgtcgccgtgcgccacgggcagagacacgttgcgatactggaagcggctcgcccacttgaactcgggcaccaccatgcggggcagtggctcctcggggaagttctcgccccacagggtgcgggtcagctgcagcgcgctcaggaggtcgggagccgagatcttgaagtcgcagttggggccggaaccctgcgcgcgcgagttgcggtacacggggttgcagcactggaacaccagcagggccggattacgcacgctggccagcaggctctcgtcgctgatcatgtcgctgtccagatcctccgcgttgctcagggcgaatggggtcatcttgcagacctgcctgcccaggaaaggcggcagcccgggcttgccgttgcagtcgcagcgcaggggcatcagcaggtgcccgtggcccgtctgcgcctgcgggtacagcgcgcgcatgaaggcttcgatctgcctgaaagccacctgcgtcttggctccctccgaaaagaacatcccacaggacttgctggagaactggttcgcgggacagctggcatcgtgcaggcagcagcgcgcgtcggtgttggcgatctgcaccacgttgcgaccccaccggttcttcactatcttggccttggaagcctgctccttcagcgcgcgctggccgttctcgctggtcacatccatctctatcacctgctccttgttgatcatgtttgtcccgtgcagacacttcaggtcgccctccgtctgggtgcagcggtgctcccacagcgcgcaaccggtgggctcccaatttttgtgggtcacccccgcgtaggcctgcaggtaggcctgcaagaagcgccccatcatggccacaaaggtcttctggctcgtaaaggtcagctgcaggccgcgatgctcttcgttcagccaggtcttgcagatggcggccagcgcctcggtctgctcgggcagcatcctaaaatttgtcttcaggtcgttatccacgtggtacttgtccatcatggcgcgcgccgcctccatgcccttctcccaggcggacaccatgggcaggcttagggggtttatcacttccaccggcgaggacaccgtactttcgatttcttcttcctccccctcttcccggcgcgcgcccacgctgctgcgcgctctcaccgcctgcaccaaggggtcgtcttcaggcaagcgccgcaccgagcgcttgccgcccttgacctgcttaatcagcaccggcgggttgctgaagcccaccatggtcagctccgcctgctcttcttcgtcttcgctgtctaccactatctctggggaagggcttctccgctctgcggcggtgcgcttcttttttttcttgggagcagccgtgacggagtccgccacggcgacggaggtcgagggcgtggggctgggggtgcgcggtaccagggcctcgtcgccctcggactcttcctctgactccaggcggcggcggagacgcttctttgggggcgcgcgcgtcagcggcggcggagacggggacggggacggggacgggacgccctccacagggggtggtcttcgcgcagacccgcggccgcgctcgggggtcttttcgagctggtcttggtcccgactggccattgtatcctcctcctcctaggcagagagacataaggagtctatcatgcaagtcgagaaggaggagagcttaaccaccccctctgagaccgccgatgcgcccgccgtcgccgtcgcccccgctgccgccgacgcgcccgccacaccgagcgacacccccgcggaccccccagccgacgcacccctgttcgaggaagcggccgtggagcaggacccgggctttgtctcggcagaggaggatttgcgagaggaggaggataaggagaagaagccctcagtgccaaaagatgataaagagcaagacgagcacgacgcagatgcacaccagggtgaagtcgggcggggggacggagggcatgacggcgccgactacctagacgaagggaacgacgtgctcttgaagcacctgcatcgtcagtgcgccatcgtttgcgacgctctgcaggagcgcagcgaagtgcccctcagcgtggcggaggtcagccacgcctacgagctcagcctcttctccccccgggtgcccccccgccgccgcgaaaacggcacatgcgagcccaacccgcgcctcaacttctaccccgcctttgtggtgcccgaggtcctggccacctatcacatcttctttcaaaattgcaagatccccctctcgtgccgcgccaaccgtagccgcgccgataagatgctggccctgcgccagggcgaccacatacctgatatcgccgctttggaagatgtgccaaagatcttcgagggtctgggtcgcaacgagaagcgggcagcaaactctctgcaacaggaaaacagcgaaaatgagagtcacaccggggtactggtggagctcgagggcgacaacgcccgcctggcggtggtcaagcgcagcatcgaggtcacccactttgcctaccccgcgctcaacctgccccccaaagtcatgaacgcggccatggacgggctgatcatgcgccgcggccggcccctcgctccagatgcaaacttgcatgaggagaccgaggacggccagcccgtggtcagcgacgagcagctggcgcgctggctggagaccgcggaccccgccgaactggaggagcggcgcaagatgatgatggccgcggtgctggtcaccgtagagctggagtgtctgcagcgcttcttcggcgaccccgagatgcagagaaaggtcgaggagaccctgcactacaccttccgccagggctacgtgcgccaggcttgcaagatctccaacgtggagctcagcaacctggtgtcctacctgggcatcttgcatgagaaccgcctcgggcagagcgtgctgcactccaccctgcgcggggaggcgcgccgcgactacgtgcgcgactgcgtttacctcttcctctgctacacctggcagacggccatgggggtctggcagcagtgcctggaggagcgcaacctcaaggagctggagaagctcctgcagcgcgcgctcaaagacctctggacgggctacaacgagcgctcggtggccgccgcgctggccgacctcatcttccccgagcgcctgctcaaaaccctccagcaggggctgcccgacttcaccagccaaagcatgttgcaaaacttcaggaactttatcctggagcgttctggcatcctacccgccacctgctgcgccctgcccagcgactttgtccccctcgtgtaccgcgagtgccccccgccgctgtggggtcactgctacctgttccaactggccaactacctgtcctaccacgcggacctcatggaggactccagcggcgaggggctcatggagtgccactgccgctgcaacctctgcacgccccaccgctccctggtctgcaacacccaactgctcagcgagagtcagattatcggtaccttcgagctacagggtccgtcctcctcagacgagaagtccgcggctccggggctaaaactcactccggggctgtggacttccgcctacctgcgcaaatttgtacctgaagactaccacgcccacgagatcaggttttacgaagaccaatcccgcccgcccaaggcggagctgaccgcctgcgtcatcacccagggcgagatcctaggccaattgcaagccatccaaaaagcccgccaagattttttgctgagaaagggtcggggggtgtatctggacccccagtcgggtgaggagctcaacccggttcccccgctgccgccgccgcgggaccttgcttcccaggataagcatcgccatggctcccagaaagaagcagcagcggccgccactgccgccaccccacatgctggaggaagaggaggaatactgggacagtcaggcagaggaggtttcggacgaggaggagccggagacggagatggaagagtgggaggaggacagcttagacgaggaggcttccgaagccgaagaggcagacgcaacaccgtcaccctcggccgcagccccctcgcaggcgcccccgaagtccgctcccagcatcagcagcaacagcagcgctataacctccgctcctccaccgccgcgacccacggccgaccgcagacccaaccgtagatgggacaccaccggaaccggggccggtaagtcctccgggagaggcaagcaagcgcagcgccaaggctaccgctcgtggcgcgctcacaagaacgccatagtcgcttgcttgcaagactgcggggggaacatctccttcgcccgccgcttcctgctcttccaccacggtgtggccttcccccgtaacgtcctgcattactaccgtcatctctacagcccctactgcggcggcagtgagccagagacggtcggcggcggcggcggcgcccgtttcggcgcctaggaagacccagggcaagacttcagccaagaaactcgcggcggccgcggcgaacgcggtcgcgggggccctgcgcctgacggtgaacgaacccctgtcgacccgcgaactgagaaaccgaatcttccccactctctatgccatcttccagcagagcagagggcaggatcaggaactgaaagtaaaaaacaggtctctgcgctccctcacccgcagctgtctgtatcacaagagcgaagaccagcttcggcgcacgctggaggacgctgaggcactcttcagcaaatactgcgcgctcactcttaaggactagctccgcgcccttctcgaatttaggcgggaacgcctacgtcatcgcagcgccgccgtcatgagcaaggacattcccacgccatacatgtggagctatcagccgcagatgggactcgcggcgggcgcctcccaagactactccacccgcatgaactggctcagtgccggcccacacatgatctcacaggttaatgatatccgcacccatcgaaaccaaatattggtggagcaggcggcaattaccaccacgccccgcaataatcccaaccccagggagtggcccgcgtccctggtgtatcaggaaattcccggccccaccaccgtactacttccgcgtgattcccaggccgaagtccaaatgactaactcaggggcgcagctcgcgggcggctgtcgtcacagggtgcggcctcctcgccagggtataactcacctggagatccgaggcagaggtattcagctcaacgacgagtcggtgagctcctcgctcggtctaagacctgacgggaccttccagatagccggagccggccgatcttccttcacgccccgccaggcgtacctgactctgcagagctcgtcctcggcgccgcgctcgggcggcatcgggactctccagttcgtgcaggagtttgtgccctcggtctacttcaaccccttctcgggctctcccggtcgctacccggaccagttcatctcgaactttgacgccgcgagggactcggtggacggctacgactgaatgtcgggtggacccggtgcagagcaacttcgcctgaagcacctcgaccactgccgccgccctcagtgctttgcccgctgtcagaccggtgagttccagtacttttccctgcccgactcgcacccggacggcccggcgcacggggtgcgctttttcatcccgagtcaggtgcgctctaccctaatcagggagtttaccgcccgtcccctactggcggagttggaaaaggggccttctatcctaaccattgcctgcatctgctctaaccctggattgcaccaagatctttgctgtcatttgtgtgctgagtataataaaggctgagatcagaatctactcgggctcctgtcgccatcctgtcaacgccaccgtccaagcccggcccgatcagcccgaggtgaacctcacctgcggtctgcaccggcgcctgaggaaatacctagcttggtactacaacagcactccctttgtggtttacaacagctttgaccaggacggggtctcactgagggataacctctcgaacctgagctactccatcaggaagaacagcaccctcgagctacttcctccttacctgcccgggacttaccagtgtgtcaccggtccctgcacccacacccacctgttgatcgtaaacgactctcttccgagaacagacctcaataactcctcttcgcagttccccagaacaggaggtgagctcaggaaaccccgggtaaagaagggtggacaagagttaacacttgtggggtttctggtgtatgtgacgctggtggtggctcttttgattaaggcttttccttccatgtctgaactctccctcttttatgaacaactcgactagtgctaacgggaccctacccaacgaatcgggattgaatatcggtaaccaggttgcagtttcacttttgattaccttcatagtcctcttcctgctagtgctgtcgcttctgtgcctgcggatcgggggctgctgcatccacgtttatatctggtgctggctgtttagaaggttcggagaccatcgcaggtagaataaacatgctgctgcttaccctctttgtcctggcgctggccgccagctgccaagccttttccgaggctgactttatagagccccagtgtaacgtgacttttaaagcccatgcacagcgttgtcatactataatcaaatgtgccaccgaacacgatgaataccttatccagtataaagataaatcacacaaagtggcacttgttgacatctggaaacccgaagaccctttggaatacaatgtgaccgttttccagggtgacctcttcaaaatttacaattacactttcccatttgaccagatgtgtgactttgtcatgtacatggaaaagcagcacaagctgtggcctccgactccccagggctgtgtggaaaatccaggctctttctgcatgatctctctctgtgtaactgtgctggcactaatactcacgcttttgtatatcagatttaaatcaaggcaaagcttcatcgatgaaaagaaaatgccttaaacgctttcacgcttgattgctaacaccgggtttttatccgcagaatgattggaatcaccctactaatcacctccctccttgcgattgcccatgggttggaacgaatcgaagcccctgtgggggccaatgttaccctggtggggcctgtcggcaatgctacattaatgtgggaaaaatatactaaaaatcaatgggtctcttactgcactaacaaaaacagccacaagcccagagccatctgcgatgggcaaaatctaaccttgattgatgttcaaatgctggatgcgggctactattatgggcagctgggtacaatgattaattactggagaccccacaaagattacatgctccacgtagtaaagggtccccttagcagcccacccactaccacctctactacccccactaccaccactactcccaccaccagcactgccgcccagcctcctcatagcagaacaaccacttttatcaattccaagtcccactccccccacattgccggcgggccctccgcctcagactccgagaccaccgagatctgcttctgcaaatgctctgacgcctttgctgaggatttggaagaccacgaggaagatgagcatgacttcgcagatgcatgccaggcatcagaggcagaagcgctgccggtggccctcaaacagtatgcagacccccacaccacccccaaccttcctccaccttcccagaagccaagtttcctgggggaaaatgaaactctgcctctctccatactcgctctgacatctgttgctatgttgaccgctctgctggtgcttctatgctctatatgctacctgatctgctgcagaaagaaaaaatctcacggccatgctcaccagcccctcatgcacttcccttaccctccagagctgggcgaccacaaactttaagtctgcagtaactatctgcccatcccttgtcagtcgacagcgatgagccccactaatctaacggcctctggacttacaacatcgtctcttaatgagaccaccgctcctcaagacctgtacgatggtgtctccgcgctggttaaccagtgggatcacctgggcatatggtggctcctcataggagcagtgaccctgtgcctaatcctggtctggatcatctgctgcatcaaaagcagaagacccaggcggcggcccatctacaggccctttgtcatcacacctgaagatgatgatgacaccacttccaggctgcagaggctaaagcagctactcttctcttttacagcatggtaaattgaatcatgcctcgcattttcatctacttgtctctccttccactttttctgggctcttctacattggccgctgtgtcccacatcgaggtagactgcctcacgcccttcacagtctacctgcttttcggctttgtcatctgcacctttgtctgcagcgttatcactgtagtgatctgcttcatacagtgcatcgactacgtctgcgtgcgggtggcttactttagacaccacccccagtatcgcaacagggacatagcggctctcctaagacttgtttaaaatcatggccaaattaactgtgattggtcttctgatcatctgctgcgtcctagccgcgattgggactcaagctcctaccaccaccagcgctcccagaaagagacatgtatcctgcagcttcaagcgtccctggaatataccccaatgctttactgatgaacctgaaatctctttggcttggtacttcagcgtcaccgcccttcttatcttctgcagtacggttattgcccttgccatctacccttcccttgacctgggctggaatgctgtcaactctatggaatatcccaccttcccagaaccagacctgccagacctggttgttctaaacgcgtttcctcctcctgctcccgttcaaaatcagtttcgccctccgtcccccacgcccactgaggtcagctactttaatctaacaggcggagatgactgaaaacctagacctagaaatggacggtctctgcagcgagcaacgcacactagagaggcgccggcaaaaagagctcgagcgtcttaaacaagagctccaagacgcggtggccatacaccagtgcaaaaaaggtgtcttctgtctggtaaaacaggccacgctcacctatgaaaaaacaggtgacacccaccgcctaggatacaagctgcccacacagcgccagaagttcgccctcatgataggcgaacaacccatcaccgtgacccagcactccgtggagacagaaggctgcatacacgctccctgtaggggcgctgactgcctctacaccttgatcaaaaccctctgcggtctcagagacctcatcccttttaattaatcataactgtaatcaataaaaaatcacttacttgaaatctgatagcaagcctctgtccaattttttcagcaacacttccttcccctcctcccaactctggtactctaggcgcctcctagctgcaaacttcctccacagtctgaagggaatgtcagattcctcctcctgtccctccgcacccacgatcttcatgttgttgcagatgaaacgcgcgagatcgtctgacgagaccttcaaccccgtgtacccctacgataccgagatcgctccgacttctgtccctttccttacccctccctttgtgtcatccgcaggaatgcaagaaaatccagctggggtgctgtccctgcacttgtcagagccccttaccacccacaatggggccctgactctaaaaatggggggcggcctgaccctggacaaggaagggaatctcacttcccaaaacatcaccagtgtcgatccccctctcaaaaaaagcaagaacaacatcagccttcagaccgccgcacccctcgccgtcagctccggggccctaacactttttgccactccccccctagcggtcagtggtgacaaccttactgtgcagtctcaggcccctctcactttggaagactcaaaactaactctggccaccaaaggacccctaactgtgtccgaaggcaaacttgtcctagaaacagaggctcccctgcatgcaagtgacagcagcagcctgggccttagcgttacggccccacttagcattaacaatgacagcctaggactagacatgcaagcgcccattagctctcgagatggaaaactggctctaacagtggcggcccccctaactgtggtcgagggtatcaatgctttggcagtagccacaggtaagggtattgggctaaatgaaaccaacacacacctgcaggcaaaactggtcgcacccctaggctttgataccaacggcaacattaagctaagcgttgcaggaggcatgaggctaaacaataacacactgatactagatgtaaactacccatttgaggctcaaggccaactgagcctaagagtgggctcgggcccactatatgtagattctagtagtcataacctaaccattagatgccttaggggattgtatataacatcttctaacaaccaaaacggtctagaagccaacattaaactaacaagaggccttgtgtatgacggaaatgccatagcagttaatgttggcaaagggctggaatacagccctactgacacaacagaaaaacctatacagactaaaataggtctaggcatggagtatgataccgagggagccatgatgacaaaactaggctctggactaagctttgacaattcaggagccattgtagtgggaaacaaaaatgatgacaggcttactttgtggaccacaccggacccatcgcccaactgtcagatctactctgaaaaagatgctaaactaaccttggtactgactaaatgtggcagtcaggttgtaggcacagtatctattgccgctcttaaaggtagcctcgtgccaatcactagtgcaatcagtgtggttcaggtatacctaaggtttgatgaaaatggggtactaatgagtaactcttcacttaatggcgaatactggaattttagaaacggagactcaactaatggcacaccatatacaaacgcagtgggtttcatgcctaatctactggcctatcctaaaggtcaaactacaactgcaaaaagtaacattgtcagccaggtctacatgaatggggacgatactaaacccatgacatttacaatcaacttcaatggccttagtgaaacaggggatacccctgttagtaaatattccatgacattctcatggaggtggccaaatggaagctacatagggcacaattttgtaacaaactcctttaccttctcctacatcgcccaagaataaagaaagcacagagatgcttgtttttgatttcaaaattgtgtgcttttatttattttcagcttacagtatttccagtagtcattcaaataaagcttaatcaaactgcatgagaacccttccacatagcttaaattagcaccagtgcaaatggagaaaaatcaacatacctttttttatccagatatcagagaactctagtggtcagttttcccccaccctcccagctcacagaatacacagtcctttccccccggctggctttaaacaacactatctcattggtaacagacatattcttaggtgtaataatccacacggtctcttggcgggccaaacgctggtcggtgatgttaataaactccccaggcagctctttcaagttcacgtcgctgtccaactgctgaagcgctcgcggctccgactgcgcctctagcggaggcaacggcaacacccgatccttgatctataaaggagtagagtcataatcccccataagaatagggcggtgatgcagcaacaaggcgcgcagcaactcctgccgccgcctctccgtacggcaggaatgcaacggcgtggtggtctcctccgtgataatccgcaccgctcgcagcatcagcatcctcgtcctccgggcacagcagcgcatcctgatctcactgagatcggcgcagtaagtgcagcacaaaaccaagatgttatttaagatcccacagtgcaaagcactgtacccaaagctcatggcgggaaggacagcccccacgtgaccatcataccagatcctcaggtaaatcaaatgacgacctctcataaacacgctggacatgtacatcacctccttgggcatgtgctgattcaccacctctcgataccacaagcatcgctgattaattaaagacccctcgagcaccatcctaaaccaggaagccagcacctgaccccccgccaggcactgcagggaccccggtgaatcgcagtggcagtgaagactccagcgctcgtagccgtgaaccatagagctggtcattatatccacattggcacaacacagacacactttcatacactttttcatgattagcagctcctctctagtcaggaccatatcccaaggaatcacccactcttgaatcaaggtaaatcccacacagcagggcaggcctctcacataactcacgttatgcatagtgagcgtgtcgcaatctggaaataccggatgatcttccatcaccgaagcccgggtctccgtctcaaagggaggtaaacggtccctcgtgtagggacagtggcgggataatcgagatcgtgttgaacgtagagtcatgccaaagggaacagcggacgtactcatatttcctccagcagaaccaagtgcgcgcgtggcagctatccctgcgtcttctgtctcgccgcctgccccgttcggtgtagtagttgtaatacagccactccctgagaccgtcaaggcgctccctggcgtccggatctatgacaacaccgtcctgcagcgccgccctgatgacatccaccaccgtagagtatgccaagcccagccaggaaatgcattcactttgacagcgagagataggaggagcggggagagatggaagaaccatgatagtaaagagaacttttattccaatcgatcttctaagatatcaaagtggagatctataagatgacactggtctcctccgctgagtcgatcaaaaataacagctaaaccacaaacaacacgattggtcaaatgctccacaagggcctgcagcataaaattgcctcggaactccaccgcaagcataacatcaaagccaccgcctctatcgtgatcaagaataaaaaccccacagctatccaccagacccatatagttttcatctctccatcgtgaaaaaagatttacaagctcctcctttaaatcacctccaaccaattgaaaaagttgaaccagaccgccctccaccttcattttcagcaagcgtatcatgattgcaaaaattcaggctcctcagacacctgtataagattgagaagcggaacgttaacatcgatgtttcgctcgcgtaaatcacgcctcagtgcaagcataatataatcccacaggtcggagcggatcagcgaggacacctccccgccaggaaccaactcaacggagcctatgctgattataatacgcatattcggagctatgctaaccagcacggcccccaaataggcgtactgcataggcggcgacaaaaagtgaacagtttgggttaaaaaatcaggcaaacactcgcgcaaaaaagcaagaacatcataaccatgctcatgcaaatagatgcaagtaagctcaggaacaaccacagaaaaatgcacaatttttctctcaaacatgactgcgagccctgcaaaaaataaaaaagaaacattacacaagagtagcctgtcttacgatgggatagactactctaaccaacataagacgggccacaacatcgcccgcgtggccataaaaaaaattgtccgtgtgattaaaaagaagcacagatagctggccagtcatatccggagtcatcacgtgtgaacccgtgtagacccccgggttggacacatcggccaaagaaagaaagcggccaatgtacccaggaggaattataacactaagacgaagatacaacagaataaccccatgagggggaataacaaagttagtaggtgaataaaaacgataaacacccgaaactccctcctgcgtaggcaaaatagcaccctccccttccaaaacaacatatagcgcttccacagcagccatgacaaaagactcaaaacactcaaaagactcagtcttaccaggaaaataaaagcactctcacagcaccagcactaatcagagtgtgaagagggccaagtgccgaacgagtatatataggaataaaaaatgacgtaaatgtgtaaaggtcagaaaacgcccagaaaaatacacagaccaacgcccgaaacgaaaacccgcgaaaaaatacccagaacttcctcaacaaccgccacttccgctttctcacggtacgtcacttccgcaagaaaagcaaaactacatttcccacatgtgtaaaaacgaaaccccgccccttgtaaccgcccacaacttacatcatcaaaacgtaaactcctacgtcacccgccccgcctctccccgcccacctcattatcatattggccacaatccaaaataaggtatattattgatgatg

SEQ ID NO: 81 - DNA, 37195 bp, Gorilla beringei graueri
ataatataccttattttggattgtggccaatatgataatgaggtgggcggggagaggcggggcgggtgacgtaggacgcgcgagtagggttgggaggtgtggcggaagtgtggcatttgcaagtgggaggagctcacatgcaagcttccgtcgcggaaaatgtgacgtttttgatgagcgccgcctacctccggaagtgccaattttcgcgcgcttttcaccggatatcgtagtaattttgggcgggaccatgtaagatttggccattttcgcgcgaaaagtgaaacggggaagtgaaaactgaataatagggcgttagtcatagtgcgtaatatttaccgagggccgagggactttgaccgattacgtggaggactcgcccaggtgttttttacgtgaatttccgcgttccgggtcaaagtctccgttttattgtcaccgtcatttgacgcggagggtatttaaacccgctgcgctcctcaagaggccactcttgagtgccagcgagaagagttttctcctctgctccgcttcggtgatcgaaaaatgagacacatagcctgcactccgggtcttttgtccggtcgggcggcggccgagcttttggacgctttgatcaatgatgtcctgagcgatgattttccgtctactacccactttagcccacctactcttcacgaactgtacgatctggatgtactggtggatgtgaacgatcccaacgaggaggcggtttctgcgttttttcccgagtctgcgctgttggccgctcaggagggatttgacctacacactccgccgcctattttagagtctccgctgccggagcccagtggtataccttatatgcctgaactgcttcccgaagtggtagacctgacctgccacgagcctggctttccgcccagcgacgatgatggtgagccttttgttttagactttgctgagatacctgggcacggttgcaggtcttgtgcatatcatcagagggttaccggagaccccgaggttaagtgttcgctgtgctatatgaggatgacctcttcctttatctacagtaagtttttgtctaggtgggcttttgggtaggtgggttttgtgtcagaacaggtgtaaacgttgcttgtgttttttgtacctgtaggtccggtgtccgagccagacccggagcccgaccgcgatcccgagccggatcccgagcctcctcgtagggcaagaaaattaccttctattctgtgcaagtctaagacacctgtgaggaccagcgaggcggacagcaccgactctggcacttctacctctcctcctgaaattcacccagtggttcctctgggtatacatagacctgttgctgttagagtttgcgggcgacgctctgcagtagagtgcattgaggacttgcttcacgaacccgaggaacctttggacttgagcgttaaacgccctaggcaataaaccccacctaagtaataaaccccacctaagtaataaaccctgccgcccttggttattgagatgacgcccaatgtttgcttttgaatgacttcatgtgtgtaataaaagtgagtgtgatcataggtctcttgtttgtctgggcggggcttaagggtatataagtctcttggggctaaacttggttacacttgaccccaatggaggcgtgggggtgcttggaggagtttgcggacgtgcgccgtttgctggacgagagctctagcaatacctatactatttggaggtatctgtggggctctactcaggccaagttggtctccagaattaagcaggattacaagtgcgattttgaagagctttttagttcctgcggtgagcttttgcaatccttgaatctgggccatcaggctattttccaggaaaaggttctctcgactttggatttttccactcccgggcgcaccgccgcttgtgtggcttttgtgtcttttgtgcaagataaatggagcgaggagacccacctgagtcacggctacgtactggatttcatggcgatggctctttggagggcttacaacaaatggaagattcagaaggaactgtacggttccgccctacgtcgtccacttctgtcgcgacaggggctgaggtttcccgaccatcggcagcatcagaatctggaagacgagtcggaggagcgagcggaggagaagatcagcttgagagccggcctggaccctcctcaggaggaatgaatctcccgcaggtggttgacctgtttccagaactgagacgggtcctgactatcagggaggatggtcagtttgtgaagaagtttaagagggatcggggtgagggagatgatgaggcggctagcaatttagcttttagtctgatgactcgccaccgaccggaatgtattacctatcagcagattaaggagagttgtgccaacgagctggatcttttgggtcagaagtatagcatagaacagcttaccacttactggcttcagcctggggatgattgggaagaggcgatcagggtgtatgcaaaggtggccctgcggcccgattgcaagtataagattactaagttggttaatattagaaactgctgctatatttctgggaacggggccgaagtggagatagatactcaggacagggtggcttttaggtgttgcatgataaacatgtggcccgggatactggggatggatggggtggtattcatgaatgtgaggtttacgggccccaactttaatggcacggtgttcatgggcaacaccaacttgctcctgcatggtgcgagtttctatgggtttaataacacctgtatagaggcctggaccgatgtaaaggttcgaggttgttccttttatagctgttggaaggcggtggtgtgtcgccctaaaagcaggggttctgtgaaaaaatgcttgtttgaaaggtgcaccttaggcatcctctctgagggcaactccagggtgcgccataatgtggcttcgaactgcggttgcttcatgcaagtgaagggggtgagcgttatcaagcataactcggtgtgtggaaactgcgaggatcgcgcctcccagatgctgacctgctttgatggcaactgtcacctgttgaagaccattcatataagcagccaccccagaaaggcctggcccgtgtttgagcataacatcttgacccgctgctccttgcatctgggggtcaggaggggtatgttcctgccttaccagtgtaactttagccacactaaaatcctgctggaacccgagtgcatgaccaaggtcagcctgaatggtgtgtttgatgtgactctgaaaatctggaaggtgctgaggtatgatgagaccaggaccaggtgccgaccctgcgagtgcggcggcaagcacatgagaaatcagcctgtgatgttggatgtgaccgaggagcttaggcctgaccatctggtgctggcctgcaccagggccgagtttgggtctagcgatgaggataccgattgaggtgggtaaggtgggcgtggctagaagggtggggcgtgtataaattgggggtctaagggtctctctgttttgtcttgcaacagccgccgccatgagcgacaccggcaacagctttgatggaagcatctttagcccctatctgacagtgcgcatgcctcactgggctggagtgcgtcagaatgtgatgggttccaacgtggatggacgccccgttctgccttcaaattcgtctacaatggcctacgcgaccgtgggaggaactccgctggacgccgcgacctccgccgccgcctccgccgccgccgcgaccgcgcgcagcatggctacggacctttacagctctttggtggcgagcggcgcggcctctcgcgcgtctgctcgggatgagaaactgaccgctctgctgcttaaactggaagacttgacccgggagctggctcaactgacccagcaggtctccagcttgcgtgagagcagccttgcctccccctaatggcccataatataaataaaagccagtctgtttggattaagcaagtgtatgttctttatttaactctccgcgcgcggtaagcccgggaccagcggtctcggtcgtttagggtgcggtggattctttccaacacgtggtacaggtggctctggatgtttagatacatgggcatgagtccatccctggggtggaggtagcaccactgcagagcttcgtgctcgggggtggtgttgtatatgatccagtcgtagcaggagcgctgggcgtggtgctgaaaaatgtccttaagcaagaggcttatagctagggggaggcccttggtgtaagtgtttacaaatctgctcagttgggaggggtgcatccggggggatataatgtgcatcttggactggatttttaggttggctatgttcccacccagatcccttctgggattcatgttgtgcaggaccaccagcacggtatatccagtacacttgggaaatttatcgtggagcttagacgggaatgcatggaagaacttggagacgcccttgtggcctcccagattttccatacattcgtccatgatgatggcaatgggcccgtgggaagctgcctgagcaaaaatgtttctgggatcgctcacatcgtagttatgttccagggtgaggtcatcataggacatctttacaaatcgggggcggagggtcccggactgggggatgatggtgccctcgggccccggggcgtagttcccctcacagatctgcatctcccaggctttcatttcagagggagggatcatatccacctgcggagcgatgaaaaacacagtttctggcgcaggggagattaactgggatgagagcaggtttctgagcagctgtgactttccacagccggtgggcccatatatcacgcctatcaccggctgcagctggtagttaagagagctgcagctgccgtcctcccggagcaggggggccacctcgttcagcatatccctgacgtggatgttctccctgaccaattccgccagaaggcgctcgccgcccagcgaaagcagctcttgcaaggaagcaaaatttttcagcggttttaggccgtcggccgtgggcatgtttttcagcgtctgggtcagcagttccagtctgtcccacagctcggtgatgtgctctacggcatctcgatccagcagatctcctcgtttcgcgggttggggcggctttcgctgtagggcaccagccgatgggcgtccagcggggccagagtcatgtccttccatgggcgcagggtcctcgtcagggtggtctgggtcacggtgaaggggtgcgctccgggttgggcgctggccagggtgcgcttgaggctggttctgctggtgctgaatcgctgccgctcttcgccctgcgcgtcggccaggtagcatttgaccatggtctcgtagtcgagaccctcggcggcgtgccccttggcgcggagctttcccttggaggtggcgccgcacgaggggcactgcaggctcttcagggcgtagagcttgggagcgagaaacacggactctggggagtaggcgtccgcgccgcaggaagcgcagaccgtctcgcattccaccagccaagtgagctccgggcggtcagggtcaaaaaccaggttgcccccatgctttttgatgcgtttcttacctcggctctccatgaggcggtgtcccttctcggtgacgaagaggctgtccgtgtctccgtagaccgacttcaggggcctgtcttccagcggagtgcctctgtcctcctcgtagagaaactctgaccactctgagacgaaggcccgcgtccaggccaggacgaaggaggccacgtgggaggggtagcggtcgttgtccactagcgggtccaccttctccagggtgtgcaggcacatgtccccctcctccgcgtccagaaaagtgattggcttgtaggtgtaggacacgtgaccgggggttcccgacgggggggtataaaagggggtgggcaccctttcatcttcactctcttccgcatcgctgtctgcgagagccagctgctggggtaagtattccctctcgaaggcgggcatgacctcagcgctcaggttgtcagtttctaaaaatgaggaggatttgatgttcacctgtccggaggtgatacctttgagggtacctgggtccatctggtcagaaaacactatttttttgttgtcaagcttggtggcgaacgacccgtagagggcgttggagagcagcttggcgatggagcgcagggtctggtttttgtcgcggtcggctcgctccttggccgcgatgttgagttgcacgtactcgcgggccacgcacttccactcggggaagacggtggtgcgctcgtctgggatcaggcgcaccctccagcctcggttgtgcagggtgaccatgtcgacgctggtggcgacctcgccgcgcaggcgctcgttggtccagcagaggcggccgcccttgcgcgagcagaaggggggtagggggtccagctggtcctcgtttggggggtccgcgtcgatggtgaagaccccggggagcaagcgcgggtcaaagtagtcgatcttgcaagcttgcatgtccagagcccgctgccattcgcgggcggcgagcgcgcgctcgtaggggttgaggggcgggccccagggcatggggtgggtgagcgcggaggcgtacatgccgcagatgtcatacacgtacaggggttccctgaggatgccgaggtaggtggggtagcagcgccccccgcggatgctggcgcgcacgtagtcatagagctcgtgggagggggccagcatgttgggcccgaggttggtgcgctgggggcgctcggcgcggaaggcgatctgcctgaagatggcatgggagttggaggagatggtgggccgctggaagacgttgaagcttgcttcttgcaagcccaccgagtccctgacgaagcaggcgtaggactcgcgcagcttgtgcaccagctcggcggtgacctggacgtcgagcgcgcagtagtcgagggtctcgcggatgatgtcatacttatcctcccccttctttttccacagctcgcggttgaggacgaactcttcgcggtctttccagtactcttggaggggaaacccgtccgtgtccgaacggtaagagcctagcatgtagaactggttgacggcctggtaggggcaacagcccttctccacgggcagcgcgtaggcctgcgccgccttgcggagggaggtgtgggtgagggcgaaagtgtccctgaccatgactttgaggtattgatgtttgaagtctgtgtcatcgcagccgccctgttcccacagggtgtagtccgtgcgctttttggagcgcgggttgggcagggagaaggtgaggtcattgaagaggatcttccccgctcgaggcatgaagtttctggtgatgcgaaagggccctgggaccgaggagcggttgttgatgacctgggcggccaggacgatctcgtcaaagccgtttatgttgtggcccacgatgtagagctccaaaaagcggggctggcccttgatggaggggagctttttgagttcctcgtaggtgagctcctcgggcgattccaggccgtgctcctccagggcccagtcttgcaagtgagggttggccgccaggaaggatcgccagaggtcgcgggccatgagggtctgcaggcggtcgcggaaggttctgaactgtcgccccacggccatcttttcgggggtgatgcagtagaaggtgagggggtctttctcccaggggtcccatctgagctctcgggcgaggtcgcgcgcggcggcgaccagagcctcgttgccccccagtttcatgaccagcatgaagggcacgagctgcttgccaaaggctcccatccaagtgtaggtctctacatcgtaggtgacaaagaggcgctccgtgcgaggatgagagccgatcgggaagaactggatctcccgccaccagttggaggattggctgttgatgtggtgaaagtagaagtcccgtctgcgggccgagcactcgtgctggcttttgtaaaagcgaccgcagtactggcagcgctgcacgggttgtatatcttgcacgaggtgaacctggcgacctctgacgaggaagcgcagcgggaatctaagtcccccgcctggggtcccgtgtggctggtggtcttctactttggttgtctggccgccagcatctgtctcctggagggcgatggtggagcagaccaccacgccgcgagagccgcaggtccagatctcggcgctcggcgggcggagtttgatgacgacatcgcgcacattggagctgtccatggtctccagctcccgcggcggcaggtcagctgggagttcctggaggttcacctcgcagagacgggtcaaggcgcgggcagtgttgagatggtatctgatttcaaggggcgtgttggcggcggagtcgatggcttgcaggaggccgcagccccggggggccacgatggttccccgcggggcgcgaggggaggcggaagctgggggtgtgttcagaagcggtgacgcgggcgggcccccggaggtagggggggttccggccccacaggcatgggcggcaggggcacgtcttcgccgcgcgcgggcaggggctggtgctggctccgaagagcgcttgcgtgcgcgacgacgcgacggttggtgtcctgtatctgacgcctctgagtgaagaccacgggtcccgtgaccttgaacctgaaagagagttcgacagaatcaatctcggcatcgttgacagcggcctggcgcaggatctcctgcacgtcgcccgagttgtcctggtaggcgatctctgccatgaactgctcgatctcttcttcctggagatctcctcgtccggcgcgctccacggtggccgccaggtcgttggagatgcgacccatgagctgcgagaaggcgttgagcccgccctcgttccagacccggctgtagaccacgcccccctcggcgttgcgggcgcgcatgaccacctgggccaggttgagctccacgtgtcgcgtgaagacggcgtagttgcgcaggcgctggaaaaggtagttcagggtggtggcggtgtgctcggcgacgaagaagtacatgacccagcgccgcaacgtggattcattgatgtcccccaaggcctccaggcgctccatggcctcgtagaagtccacggcgaagttgaaaaactgggagttgcgagcggacacggtcaactcctcctccagaagacggatgagctcggcgacagtgtcgcgcacctcgcgctcgaaggccacggggggcgcttcttcctcttccacctcttcttccatgatcgcttcttcttcttcctcagccgggacgggagggggcggcggcggcgggggaggggcgcggcggcggcggcggcgcaccgggaggcggtcgatgaagcgctcgatcatctccccccgcatgcggcgcatggtctcggtgacggcgcggccgttctcccgggggcgcagctcgaagacgccgcctctcatctcgccgcggggcgggcggccgtgaggtagcgagacggcgctgactatgcatcttaacaattgctgtgtaggtacaccgccgagggacctgattgagtccagatccaccggatccgaaaacctttggaggaaagcgtctatccagtcgcagtcgcaaggtaggctgagcaccgtggcgggcgggggcgggtctggagagttcctggcggagatgctgctgatgatgtaattaaagtaggcggtcttgagaaggcggatggtggacaggagcaccatgtctttgggtccggcctgttggatgcggaggcggtcggccatgccccaggcctcgttctgacaccggcgcaggtctttgtagtagtcttgcatgagtctttccaccggcacctcttctccttcctcttctccatctcgccggtggtttctcgcgccgcccatgcgcgtgaccccaaagcccctgagcggctgcagcagggccaggtcggcgaccacgcgctcggccaagatggcctgctgcacctgagtgagggtcctctcgaagtcatccatgtccacgaagcggtggtaggcgcccgtgttgatggtgtaggtgcagttggccatgacggaccagttgacggtctggtgtcccggctgcgagagctccgtgtaccgcaggcgcgagaaggcgcgggaatcgaacacgtagtcgttgcaagtccgcaccagatactggtagcccaccaggaagtgcggcggaggttggcgatagaggggccagcgctgggtggcgggggcgccgggcgccaggttttccagcatgaggcggtggtatccgtagatgtacctggacatccaggtgatgccggcggcggtggtggtggcgcgcgcgtagtcgcggacccggttccagatgtttcgcaggggcgagaagtgttccatggtcggcacgctctggccggtgaggcgcgcgcagtcgttgacgctctatacacacacaaaaacgaaagcgtttacagggctttcgttctgtagcctggaggaaagtaaatgggttgggttgcggtgtgccccggttcgagaccaagctgagctcggccggctgaagccgcagctaacgtggtattggcagtcccgtctcgacccaggccctgtatcctccaggatacggtcgagagcccttttgctttcttggccaagcgcccgtggcgcgatctgggatagatggtcgcgatgagaggacaaaagcggctcgcttccgtagtctggagaaacaatcgccagggttgcgttgcggcgtaccccggttcgagcccctatggcggcttgaatcggccggaaccgcggctaacgagggccgtggcagccccgtcctcaggaccccgccagccgacttctccagttacgggagcgagccccttttgttttttattttttagatgcatcccgtgctgcggcagatgcgcccctcgccccggcccgatcagcagcagcaacagcaggcatgcagacccccctctcccctttccgccccggtcaccacggccgcggcggccgtgtcgggcgcggggggcgcgctggagtcagatgagccaccgcggcggcgacctaggcagtatctggacttggaagagggcgagggactggcgcggctgggggcgaactctccagagcgccacccgcgggtgcagttgaaaagggacgcgcgcgaggcgtacctgccgcggcagaacctgtttcgcgaccgcgggggcgaggagcccgaggagatgcgagactgcaggttccaagcggggcgcgagctgcggcgcgggctggacagacagcgcctgctgcgcgaggaggactttgagcccgacacgcagacgggcatcagccccgcgcgcgcgcacgtagccgcggccgacctggtgaccgcctacgagcagacggtgaaccaggagcgcaacttccaaaagagcttcaacaaccacgtgcgcacgctggtggcgcgcgaggaggtgaccctgggtctcatgcatctgtgggacctggtggaggcgatcgtgcagaaccccagcagcaagcccctgaccgcgcagctgttcctggtggtgcagcacagcagggacaacgaggccttcagggaggcgctgctgaacatcaccgagccggaggggcgctggctcctggacctgataaacatcctgcagagcatagtggtgcaggagcgcagcctgagcctggccgagaaggtggcggccatcaactactctatgctgagcctgggcaagttctacgcccgcaagatctacaagaccccctacgtgcccatagacaaggaggtgaagatagacagcttctacatgcgcatggcgctgaaggtgctgaccctgagcgacgacctgggagtgtaccgcaacgagcgcatccacaaggccgtgagcgccagccggcggcgcgagctgagcgaccgcgagctgatgcacagtctgcagcgcgcgctgaccggcgcgggcgagggcgacagggaggtcgagtcctacttcgacatgggggccgacctgcactggcagccgagccgccgcgccctggaggcggcgggggcgtacggcggccccctggcggccgatgaccaggaagaggaggactatgagctagaggagggcgagtacctggaggactgacctggctggtggtgttttggtatagatgcaagatccgaacgtggcggacccggcggtccgggcggcgctgcaaagccagccgtccggcattaactcctctgacgactgggccgcggccatgggtcgcatcatggccctgaccgcgcgcaaccccgaggctttcaggcagcagcctcaggccaaccggctggcggccatcttggaagcggtagtgcccgcgcgctccaaccccacccacgagaaggtgctggccatagtcaacgcgctggcggagagcagggccatccgcgcggacgaggccggactggtgtacgatgcgctgctgcagcgggtggcgcggtacaacagcggcaacgtgcagaccaacctggaccgcctggtgacggacgtgcgcgaggccgtggcgcagcgcgagcgcttgcatcaggacggtaacctgggctcgctggtggcgctaaacgccttcctcagcacccagccggccaacgtaccgcgggggcaggaggactacaccaactttttgagcgcgctgcggctgatggtgaccgaggtccctcagagcgaggtgtaccagtcggggcccgactacttcttccagaccagcagacagggcttgcaaaccgtgaacctgagccaggctttcaagaacctgcgggggctgtggggagtgaaggcgcccaccggcgaccgggctacggtgtccagcctgctaacccccaactcgcgcctgctgctgctgctgatcgcgcccttcacggacagcgggagcgtctcgcgggagacctatctgggccacctgctgacgctgtaccgcgaggccatcgggcaggcgcaggtggacgagcacaccttccaagagatcaccagcgtgagccacgcgctggggcaggaggacacgggcagcctgcaggcgaccctgaactacctgctgaccaacaggcggcagaagattcccacgctgcacagcctgacccaggaggaggagcgcatcttgcgctacgtgcagcagagcgtgagcctgaacctgatgcgcgacggcgtgacgcccagcgtggcgctggacatgaccgcgcgcaacatggaaccgggcatgtacgcctcccaccggccgttcatcaaccgcctgatggactacttgcatcgggcggcggccgtgaaccccgagtacttcactaatgccattctgaatccccactggatgccccctccgggtttctacaacggggactttgaggtgcccgaggtcaacgacgggttcctctgggatgacatggatgacagtgtgttctcacccaacccgctgcgcgccgcgtctctgcgattgaaggagggctctgacagggaaggaccgagaagtctggcctcctccctggctctgggagcggtgggcgccacgggcgcggcggcgcggggcagtagccccttccccagcctggcagactctctgaacagcgggcgggtgagcaggccccgcttgctaggcgaggaggagtatctgaacaactccctgctgcagcccgcgagggacaagaacgctcagcggcagcagtttcccaacaatgggatagagagcctggtggacaagatgtccagatggaagacgtatgcgcaggagtacaaggagtgggaggaccgccagccgcggcccttgccgccccctaggcagcgctggcagcggcgcgcgtccaaccgccgctggaggcaggggcccgaggacgatgatgactctgcagatgacagcagcgtgttggacctgggcgggagcgggaaccccttttcgcacctgcgcccacgcctgggcaagatgttttaaaagaaaaaaaaaaaataaaactcaccaaggccatggcgacgagcgttggttttttgttcccttccttagtatgcggcgcgcggcgatgttcgaggaggggcctcccccctcttacgagagcgcgatggggatttctcctgcggcgcccctgcagcctccctacgtgcctcctcggtacctgcaacctacaggggggagaaatagcatctgttactctgagctgcagcccctgtacgataccaccagactgtacctggtggacaacaagtccgcggacgtggcctccctgaactaccagaacgaccacagcgattttttgaccacggtgatccaaaacaacgacttcaccccaaccgaggccagcactcagaccataaacctggataacaggtcgaactggggcggcgacctgaagaccatcttgcacaccaacatgcccaacgtgaacgagttcatgttcaccaactcttttaaggcgcgggtgatggtggcgcgcgagcagggggaggcgaagtacgagtgggtggacttcacgctgcccgagggcaactactcagagaccatgactctcgacctgatgaacaatgcgatcgtggaacactatctgaaagtgggcaggcagaacggggtgaaggaaagcgatatcggggtcaagtttgacaccagaaacttccgtctgggctgggaccccgtgaccgggctggtcatgccgggggtctacaccaacgaggcctttcatcccgacatagtgcttctgcccggctgtggggtggacttcacccagagccggctgagcaacctgctgggcattcgcaagcggcagcctttccaggagggtttcaagatcacctatgaggatctgaaggggggcaacattcccgcgctccttgatctggacgcctacgaggagagcttgaaacccgaggagagcgctggcgacagcggcgagagtggcgaggagcaagccggcggcggtggcggcgcgtcggtagaaaacgaaagtacgcccgcagtggcggcggacgctgcggaggtcgagccggaggccatgcagcaggacgcagaggagggcgcacaggagggcgcgcagaaggacatgaacgatggggagatcaggggagacacattcgccacccggggcgaagaaaaagaggcagaggcggcggcggcggcgacggcggaggccgaaaccgaggttgaggcagaggcagagcccgagaccgaagttatggaagacatgaatgatggagaacgtaggggcgacacgttcgccacccggggcgaagagaaggcggcggaggcagaagccgcggctgaggaggcggctgcggctgcggccaagactgaggctgcggctaaggctgaggtcgaagccaatgttgcggttgaggctcaggctgaggaggaggcggcggctgaagcagttaaggaaaaggcccaggcagagcaggaagagaaaaaacctgtcattcaacctctaaaagaagatagcaaaaagcgcagttacaacgtcatcgagggcagcacctttacccagtaccgcagctggtacctggcgtacaactacggcgacccggtcaagggggtgcgctcgtggaccctgctctgcacgccggacgtcacctgcggctccgagcagatgtactggtcgctgccgaacatgatgcaagacccggtgaccttccgctccacgcggcaggttagcaacttcccggtggtgggcgccgaactgctgcccgtgcactccaagagtttttacaacgagcaggccgtctactcccagctgatccgccaggccacctctctgacccacgtgttcaatcgctttcccgagaaccagattttggcgcgcccgccggcccccaccatcaccaccgtgagtgaaaacgttcctgccctcacagatcacgggacgctaccgctgcgcaacagcatctcaggagtccagcgagtgaccattactgacgccagacgccggacctgcccctacgtttacaaggccttgggcatagtctcgccgcgcgtcctctccagtcgcactttttaaaacacatctacccacacgttccaaaatcatgtccgtactcatctcacccagcaacaacaccggctgggggctgcgcgcgcccagcaagatgtttggaggggcgaggaagcgctccgaccagcaccctgtgcgcgtgcgcggccactaccgcgcgccctggggagcgcacaagcgcgggcgcacagggcgcaccactgtggacgacgtcattgactccgtagtggagcaagcgcgccactacacacccggcgcgccgaccgcccccgccgtgtccaccgtggaccaggcgatcgaaagcgtggtacagggcgcgcggcactatgccaaccttaaaagtcgccgccgccgcgtggcccgccgccatcgccggagaccccgggccaccgccgccgcgcgccttactaaggctctgctcaggcgcgccaggcgaactggccaccgggccgccatgagggccgcacggcgggctgccgctgccgcaagcgccgtggccccgcgggcacgaaggcgcgcggccgccgccgccgccgccgccatttccagcttggcctcgacgcggcgcggtaacatatactgggtgcgcgactcggtaaccggcacgcgggtacccgtgcgctttcgccccccgcggaattagcacaagacaacatacacactgagtctcctgctgttgtgtatcccagcggcgaccgtcagcagcggcgacatgtccaagcgcaaaattaaagaagagatgctccaggtcatcgcgccggagatctatgggcccccgaagaaggaggaggatgattacaagccccgcaagctaaagcgggtcaaaaagaaaaagaaagatgatgatgatgacgaggcggtggagtttgtccgccgcatggcacccaggcgccccgtgcagtggaagggccggcgcgtgcagcgcgttttgcgccccggcaccgcggtggtcttcacgcccggcgagcgctccacgcgcactttcaagcgggtgtacgatgaggtgtacggcgacgaggacctgttggagcaggccaaccagcgctttggggagtttgcatatgggaaacggccccgcgagagtctaaaagaggacctgctggcgctaccgctggacgagggcaatcccaccccgagtctgaagccggtaaccctgcaacaggtgctgcctttgagcgcgcccagcgagcataagcgagggttgaagcgcgaaggcggggacctggcgcccaccgtgcagttgatggtgcccaagcggcagaagctggaggacgtgctggagaaaatgaaagtagagcccgggatccagcccgagatcaaggtccgccccatcaagcaggtggcgcccggcgtgggagtccagaccgtggacgttaggattcccacggaggagatggaaacccaaaccgccactccctcttcggcggccagcgccaccaccggcaccgcttcggtagaggtgcagacggacccctggctacccgccaccgctgttgccgccgccgccccccgttcgcgcgggcgcaagagaaattatccagcggccagcgcgctcatgccccagtacgcactgcatccatccatcgcgcccacccccggctaccgcgggtactcgtaccgcccgcgcagatcagccggcactcgcggccgccgccgccgtgcgaccacaaccagccgccgccgtcgccgccgccgccagccagtgctgacccccgtgtctgtaaggaaggtggctcgctcggggagcacgctggtggtgcccagagcgcgctaccaccccagcatcgtttaaagccggtctctgtatggttcttgcagatatggccctcacttgtcgcctccgcttcccggtgccgggataccgaggaagaactcaccgccgcagaggcatggcgggcagcggtctccgcggcggccgtcgccatcgccggcgcgcaaaaagcaggcgcatgcgcggcggtgtgctgcctctgctaatcccgctaatcgccgcggcgatcggtgccgtacccgggatcgcctccgtggccctgcaggcgtcccagaaacgttgactcttgcaaccttgcaagcttgcattttttggaggaaaaataaaaaaagtctagactctcacgctcgcttggtcctgtgactattttgtagaaaaaagatggaagacatcaactttgcgtcgctggccccgcgtcacggctcgcgcccgttcatgggagactggacagatatcggcaccagcaatatgagcggtggcgccttcagctggggcagtctgtggagcggccttaaaaattttggttccaccattaagaactatggcaacaaagcgtggaacagcagcacgggccagatgctgagagacaagttgaaagagcagaacttccaggagaaggtggcgcagggcctggcctctggcatcagcggggtggtggacatagctaaccaggccgtgcagaaaaagataaacagtcatctggacccccgtcctcaggtggaggaaatgcctccagcgatggagacggtgtctcccgagggcaaaggcgaaaagcgcccgcggcccgacagagaagagaccctggtgtcacacaccgaggagccgccctcttacgaggaggcagtcaaggccggcctgcccaccactcgccccatagcccccatggccaccggtgtggtgggccacaggcaacacactcccgcaacactagatctgcccccgccgtccgagccgccgcgccagccaaaggcggcgacggtgcccgctccctccacttccgccgccaacagagtgcccctgcgccgcgccgcgagcggcccccgggcctcgcgagttagcggcaactggcagagcacactgaacagcatcgtgggcctgggagtgaggagtgtgaagcgccgccgttgctactgaatgagcaagctagctaacgtgttgtatgtgtgtatgcgtcctatgtcgccgccagaggagctgttgagccgccggcgccgtctgcactccagcgaatttcaagatggcgaccccatcgatgatgcctcagtggtcgtacatgcacatctcgggccaggacgcttcggagtacctgagccccgggctggtgcagttcgcccgcgccacagacacctacttcaacatgagtaacaagttcaggaaccccactgtggcgcccacccacgatgtgaccacggaccggtcgcagcgcctgacgctgcggttcatccccgtggatcgggaggacaccgcctactcttacaaggcgcggttcacgctggccgtgggcgacaaccgcgtgctggacatggcctccacttactttgacatcaggggggtgctggacaggggccccaccttcaagccctactcgggtactgcctacaactccctggcccccaagggcgctcccaattcttgcgagtgggaacaagaggaaaatcaggtggtcgctgcagatgatgaacttgaagatgaagaagcgcaagctcaagaggacgccccagctaaaaaaattcatgtatatgcccaggcgcctcttgctggcgaaaagattaccaaggatggtttgcaaataggtactgaagttgtaggagatacatctaaggacacttttgcagacaaaacattccaacccgaacctcagataggcgagtctcagtggaacgaggctgatgccacagtagcaggaggcagagtcttgaaaaaaaccacccctatgagaccttgctatggatcctatgccaggcctacaaatgccaacgggggtcaaggaattatggttgccaatgaacaaggagtgttggagtctaaagtggagatgcaatttttttctaacactacaacccttaatgcgcgggatggagctggcaatcccgaaccaaaggtggtgttgtacagtgaagatgtccacttggaatctcctgacactcatttgtcttacaagcccaaaaaggatgatgttaatgctaaaattatgttgggtcagcaagctatggctaacaggcccaacctcattgcttttagagataatttcattggactcatgtactacaacagcactggtaacatgggagtgctggcgggtcaggcctctcagttgaatgccgtggtggacctgcaggatagaaacacagaactgtcatatcagcttatgcttgattccattggggatagatccagatacttctccatgtggaaccaggcagtggatagctatgacccagatgtcagaatcattgaaaaccatggtgtcgaggacgagctacccaactactgcttccctctgggcggcataggaattactgatacttatcaagggatcaaaaataccaatggcaatggtcagtggaccaaagatgatcagttcgcggaccgtaatgaaataggggtgggaaacaacttcgccatggagatcaacatccaggccaacctctggaggaacttcctctatgcgaacgtggggctctacctgccagacaagctcaagtacaaccccaccaacgtggacatctctgacaaccccaacacctatgactacatgaacaagcgtgtggtggctcccggcctggtggactgctttgtcaatgtgggagccaggtggtccctggactacatggacaacgtcaaccccttcaaccaccaccgcaatgcgggtctgcgctaccgctccatgatcctgggcaacgggcgctacgtgcccttccacattcaggtgccccagaagttctttgccatcaagaacctcctcctcctgccgggctcctacacttacgagtggaacttcaggaaggatgtcaacatggtcctgcagagctctctgggcaatgaccttagggtggacggggccagcatcaagtttgacagcgtcaccctctatgctaccttcttccccatggctcacaacaccgcctccacgctcgaggccatgctgaggaacgacaccaacgaccagtccttcaatgactacctctctggggccaacatgctctaccccatccccgccaaggccaccaacgtgcccatctccattccctctcgcaactgggccgccttcagaggctgggcctttacccgccttaagaccaaggaaaccccctccctgggctcgggttttgacccctactttgtctactcgggatccatcccctacctggatggcaccttctacctcaaccacacttttaagaagatatccatcatgtatgactcctccgtcagctggccgggcaatgaccgcctgctcacccccaatgagttcgaggtcaagcgcgccgtggacggcgagggctacaacgtggcccagtgcaacatgaccaaggactggttcctggtgcagatgctggccaactacaacataggctaccagggcttctacatcccagagagctacaaggacaggatgtactccttcttcagaaatttccaacccatgagcaggcaggtggtggacgagaccaaatacaaggactatcaggccattggcatcactcaccagcacaacaactcgggattcgtgggctacctggctcccaccatgcgcgaggggcaggcctaccccgccaacttcccctacccgttgataggcaagaccgcggtcgacagcgtcacccagaaaaagttcctctgcgaccgcaccctctggcgcatccccttctctagcaacttcatgtccatgggtgcgctcacggacctgggccagaacctgctctatgccaactccgcccatgcgctggacatgacttttgaggtggaccccatggacgagcccacccttctctatattgtgtttgaagtgttcgacgtggtcagagtgcaccagccgcaccgcggtgtcatcgagaccgtgtacctgcgcacgcccttctcggccggcaacgccaccacctaaggagacagcgccgccgcctgcatgacgggttccaccgagcaagagctcagggccatcgccagagacctgggatgcggaccctattttttgggcacctatgacaaacgcttcccgggcttcatctcccgagacaagctcgcctgcgccatcgtcaacacggccgcgcgcgagaccgggggcgtgcactggctggcctttggctgggacccgcgctccaaaacctgctacctcttcgacccctttggcttctccgatcagcgcctcagacagatctatgagtttgagtacgaggggctgctgcgccgcagcgcgcttgcctcctcgcccgaccgctgcatcacccttgagaagtccaccgagaccgtgcaggggccccactcggccgcctgcggtctcttctgctgcatgtttttgcacgcctttgtgcgctggccccagagtcccatggatcgcaaccccaccatgaacttgctcaagggagtgcccaacgccatgctccagagcccccaggtccagcccaccctgcgccacaaccaggaacagctctaccgcttcctggagcgccactccccctacttccgcagtcacagcgcgcacatccggggggccacctctttctgccacttgcaacaaaacatgcaagacggaaaatgatgtacagctcgctttttaataaatgtaaagactgtgcactttatttatacacgggctctttctggttatttattcaacaccgccgtcgccatctagaaatcgaaagggttctgccgcgcgtcgccgtgcgccacgggcagagacacgttgcgatactggaagcggctcgcccacttgaactcgggcaccaccatgcggggcagtggctcctcggggaagttctcgccccacagggtgcgggtcagctgcagcgcgctcaggaggtcgggagccgagatcttgaagtcgcagttggggccggaaccctgcgcgcgcgagttgcggtacacggggttgcagcactggaacaccagcagggccggattacgcacgctggccagcaggctctcgtcgctgatcatgtcgctgtccagatcctccgcgttgctcagggcgaatggggtcatcttgcagacctgcctgcccaggaaaggcggcagcccgggcttgccgttgcagtcgcagcgcaggggcatcagcaggtgcccgtggcccgtctgcgcctgcgggtacagcgcgcgcatgaaggcttcgatctgcctgaaagccacctgcgtcttggctccctccgaaaagaacatcccacaggacttgctggagaactggttcgcgggacagctggcatcgtgcaggcagcagcgcgcgtcggtgttggcgatctgcaccacgttgcgaccccaccggttcttcactatcttggccttggaagcctgctccttcagcgcgcgctggccgttctcgctggtcacatccatctctatcacctgctccttgttgatcatgtttgtcccgtgcagacacttcaggtcgccctccgtctgggtgcagcggtgctcccacagcgcgcaaccggtgggctcccaatttttgtgggtcacccccgcgtaggcctgcaggtaggcctgcaagaagcgccccatcatggccacaaaggtcttctggctcgtaaaggtcagctgcaggccgcgatgctcttcgttcagccaggtcttgcagatggcggccagcgcctcggtctgctcgggcagcatcctaaaatttgtcttcaggtcgttatccacgtggtacttgtccatcatggcgcgcgccgcctccatgcccttctcccaggcggacaccatgggcaggcttagggggtttatcacttccaccggcgaggacaccgtactttcgatttcttcttcctccccctcttcccggcgcgcgcccacgctgctgcgcgctctcaccgcctgcaccaaggggtcgtcttcaggcaagcgccgcaccgagcgcttgccgcccttgacctgcttaatcagcaccggcgggttgctgaagcccaccatggtcagctccgcctgctcttcttcgtcttcgctgtctaccactatctctggggaagggcttctccgctctgcggcggtgcgcttcttttttttcttgggagcagccgtgacggagtccgccacggcgacggaggtcgagggcgtggggctgggggtgcgcggtaccagggcctcgtcgccctcggactcttcctctgactccaggcggcggcggagacgcttctttgggggcgcgcgcgtcagcggcggcggagacggggacggggacggggacgggacgccctccacagggggtggtcttcgcgcagacccgcggccgcgctcgggggtcttttcgagctggtcttggtcccgactggccattgtatcctcctcctcctaggcagagagacataaggagtctatcatgcaagtcgagaaggaggagagcttaaccaccccctctgagaccgccgatgcgcccgccgtcgccgtcgcccccgctgccgccgacgcgcccgccacaccgagcgacacccccgcggaccccccagccgacgcacccctgttcgaggaagcggccgtggagcaggacccgggctttgtctcggcagaggaggatttgcgagaggaggaggataaggagaagaagccctcagtgccaaaagatgataaagagcaagacgagcacgacgcagatgcacaccagggtgaagtcgggcggggggacggagggcatgacggcgccgactacctagacgaagggaacgacgtgctcttgaagcacctgcatcgtcagtgcgccatcgtttgcgacgctctgcaggagcgcagcgaagtgcccctcagcgtggcggaggtcagccacgcctacgagctcagcctcttctccccccgggtgcccccccgccgccgcgaaaacggcacatgcgagcccaacccgcgcctcaacttctaccccgcctttgtggtgcccgaggtcctggccacctatcacatcttctttcaaaattgcaagatccccctctcgtgccgcgccaaccgtagccgcgccgataagatgctggccctgcgccagggcgaccacatacctgatatcgccgctttggaagatgtgccaaagatcttcgagggtctgggtcgcaacgagaagcgggcagcaaactctctgcaacaggaaaacagcgaaaatgagagtcacaccggggtactggtggagctcgagggcgacaacgcccgcctggcggtggtcaagcgcagcatcgaggtcacccactttgcctaccccgcgctcaacctgccccccaaagtcatgaacgcggccatggacgggctgatcatgcgccgcggccggcccctcgctccagatgcaaacttgcatgaggagaccgaggacggccagcccgtggtcagcgacgagcagctggcgcgctggctggagaccgcggaccccgccgaactggaggagcggcgcaagatgatgatggccgcggtgctggtcaccgtagagctggagtgtctgcagcgcttcttcggcgaccccgagatgcagagaaaggtcgaggagaccctgcactacaccttccgccagggctacgtgcgccaggcttgcaagatctccaacgtggagctcagcaacctggtgtcctacctgggcatcttgcatgagaaccgcctcgggcagagcgtgctgcactccaccctgcgcggggaggcgcgccgcgactacgtgcgcgactgcgtttacctcttcctctgctacacctggcagacggccatgggggtctggcagcagtgcctggaggagcgcaacctcaaggagctggagaagctcctgcagcgcgcgctcaaagacctctggacgggctacaacgagcgctcggtggccgccgcgctggccgacctcatcttccccgagcgcctgctcaaaaccctccagcaggggctgcccgacttcaccagccaaagcatgttgcaaaacttcaggaactttatcctggagcgttctggcatcctacccgccacctgctgcgccctgcccagcgactttgtccccctcgtgtaccgcgagtgccccccgccgctgtggggtcactgctacctgttccaactggccaactacctgtcctaccacgcggacctcatggaggactccagcggcgaggggctcatggagtgccactgccgctgcaacctctgcacgccccaccgctccctggtctgcaacacccaactgctcagcgagagtcagattatcggtaccttcgagctacagggtccgtcctcctcagacgagaagtccgcggctccggggctaaaactcactccggggctgtggacttccgcctacctgcgcaaatttgtacctgaagactaccacgcccacgagatcaggttttacgaagaccaatcccgcccgcccaaggcggagctgaccgcctgcgtcatcacccagggcgagatcctaggccaattgcaagccatccaaaaagcccgccaagattttttgctgagaaagggtcggggggtgtatctggacccccagtcgggtgaggagctcaacccggttcccccgctgccgccgccgcgggaccttgcttcccaggataagcatcgccatggctcccagaaagaagcagcagcggccgccactgccgccaccccacatgctggaggaagaggaggaatactgggacagtcaggcagaggaggtttcggacgaggaggagccggagacggagatggaagagtgggaggaggacagcttagacgaggaggcttccgaagccgaagaggcagacgcaacaccgtcaccctcggccgcagccccctcgcaggcgcccccgaagtccgctcccagcatcagcagcaacagcagcgctataacctccgctcctccaccgccgcgacccacggccgaccgcagacccaaccgtagatgggacaccaccggaaccggggccggtaagtcctccgggagaggcaagcaagcgcagcgccaaggctaccgctcgtggcgcgctcacaagaacgccatagtcgcttgcttgcaagactgcggggggaacatctccttcgcccgccgcttcctgctcttccaccacggtgtggccttcccccgtaacgtcctgcattactaccgtcatctctacagcccctactgcggcggcagtgagccagagacggtcggcggcggcggcggcgcccgtttcggcgcctaggaagacccagggcaagacttcagccaagaaactcgcggcggccgcggcgaacgcggtcgcgggggccctgcgcctgacggtgaacgaacccctgtcgacccgcgaactgagaaaccgaatcttccccactctctatgccatcttccagcagagcagagggcaggatcaggaactgaaagtaaaaaacaggtctctgcgctccctcacccgcagctgtctgtatcacaagagcgaagaccagcttcggcgcacgctggaggacgctgaggcactcttcagcaaatactgcgcgctcactcttaaggactagctccgcgcccttctcgaatttaggcgggaacgcctacgtcatcgcagcgccgccgtcatgagcaaggacattcccacgccatacatgtggagctatcagccgcagatgggactcgcggcgggcgcctcccaagactactccacccgcatgaactggctcagtgccggcccacacatgatctcacaggttaatgatatccgcacccatcgaaaccaaatattggtggagcaggcggcaattaccaccacgccccgcaataatcccaaccccagggagtggcccgcgtccctggtgtatcaggaaattcccggccccaccaccgtactacttccgcgtgattcccaggccgaagtccaaatgactaactcaggggcgcagctcgcgggcggctgtcgtcacagggtgcggcctcctcgccagggtataactcacctggagatccgaggcagaggtattcagctcaacgacgagtcggtgagctcctcgctcggtctaagacctgacgggaccttccagatagccggagccggccgatcttccttcacgccccgccaggcgtacctgactctgcagagctcgtcctcggcgccgcgctcgggcggcatcgggactctccagttcgtgcaggagtttgtgccctcggtctacttcaaccccttctcgggctctcccggtcgctacccggaccagttcatctcgaactttgacgccgcgagggactcggtggacggctacgactgaatgtcgggtggacccggtgcagagcaacttcgcctgaagcacctcgaccactgccgccgccctcagtgctttgcccgctgtcagaccggtgagttccagtacttttccctgcccgactcgcacccggacggcccggcgcacggggtgcgctttttcatcccgagtcaggtgcgctctaccctaatcagggagtttaccgcccgtcccctactggcggagttggaaaaggggccttctatcctaaccattgcctgcatctgctctaaccctggattgcaccaagatctttgctgtcatttgtgtgctgagtataataaaggctgagatcagaatctactcgggctcctgtcgccatcctgtcaacgccaccgtccaagcccggcccgatcagcccgaggtgaacctcacctgcggtctgcaccggcgcctgaggaaatacctagcttggtactacaacagcactccctttgtggtttacaacagctttgaccaggacggggtctcactgagggataacctctcgaacctgagctactccatcaggaagaacagcaccctcgagctacttcctccttacctgcccgggacttaccagtgtgtcaccggtccctgcacccacacccacctgttgatcgtaaacgactctcttccgagaacagacctcaataactcctcttcgcagttccccagaacaggaggtgagctcaggaaaccccgggtaaagaagggtggacaagagttaacacttgtggggtttctggtgtatgtgacgctggtggtggctcttttgattaaggcttttccttccatgtctgaactctccctcttttatgaacaactcgactagtgctaacgggaccctacccaacgaatcgggattgaatatcggtaaccaggttgcagtttcacttttgattaccttcatagtcctcttcctgctagtgctgtcgcttctgtgcctgcggatcgggggctgctgcatccacgtttatatctggtgctggctgtttagaaggttcggagaccatcgcaggtagaataaacatgctgctgcttaccctctttgtcctggcgctggccgccagctgccaagccttttccgaggctgactttatagagccccagtgtaacgtgacttttaaagcccatgcacagcgttgtcatactataatcaaatgtgccaccgaacacgatgaataccttatccagtataaagataaatcacacaaagtggcacttgttgacatctggaaacccgaagaccctttggaatacaatgtgaccgttttccagggtgacctcttcaaaatttacaattacactttcccatttgaccagatgtgtgactttgtcatgtacatggaaaagcagcacaagctgtggcctccgactccccagggctgtgtggaaaatccaggctctttctgcatgatctctctctgtgtaactgtgctggcactaatactcacgcttttgtatatcagatttaaatcaaggcaaagcttcatcgatgaaaagaaaatgccttaaacgctttcacgcttgattgctaacaccgggtttttatccgcagaatgattggaatcaccctactaatcacctccctccttgcgattgcccatgggttggaacgaatcgaagcccctgtgggggccaatgttaccctggtggggcctgtcggcaatgctacattaatgtgggaaaaatatactaaaaatcaatgggtctcttactgcactaacaaaaacagccacaagcccagagccatctgcgatgggcaaaatctaaccttgattgatgttcaaatgctggatgcgggctactattatgggcagctgggtacaatgattaattactggagaccccacaaagattacatgctccacgtagtaaagggtccccttagcagcccacccactaccacctctactacccccactaccaccactactcccaccaccagcactgccgcccagcctcctcatagcagaacaaccacttttatcaattccaagtcccactccccccacattgccggcgggccctccgcctcagactccgagaccaccgagatctgcttctgcaaatgctctgacgcctttgctgaggatttggaagaccacgaggaagatgagcatgacttcgcagatgcatgccaggcatcagaggcagaagcgctgccggtggccctcaaacagtatgcagacccccacaccacccccaaccttcctccaccttcccagaagccaagtttcctgggggaaaatgaaactctgcctctctccatactcgctctgacatctgttgctatgttgaccgctctgctggtgcttctatgctctatatgctacctgatctgctgcagaaagaaaaaatctcacggccatgctcaccagcccctcatgcacttcccttaccctccagagctgggcgaccacaaactttaagtctgcagtaactatctgcccatcccttgtcagtcgacagcgatgagccccactaatctaacggcctctggacttacaacatcgtctcttaatgagaccaccgctcctcaagacctgtacgatggtgtctccgcgctggttaaccagtgggatcacctgggcatatggtggctcctcataggagcagtgaccctgtgcctaatcctggtctggatcatctgctgcatcaaaagcagaagacccaggcggcggcccatctacaggccctttgtcatcacacctgaagatgatgatgacaccacttccaggctgcagaggctaaagcagctactcttctcttttacagcatggtaaattgaatcatgcctcgcattttcatctacttgtctctccttccactttttctgggctcttctacattggccgctgtgtcccacatcgaggtagactgcctcacgcccttcacagtctacctgcttttcggctttgtcatctgcacctttgtctgcagcgttatcactgtagtgatctgcttcatacagtgcatcgactacgtctgcgtgcgggtggcttactttagacaccacccccagtatcgcaacagggacatagcggctctcctaagacttgtttaaaatcatggccaaattaactgtgattggtcttctgatcatctgctgcgtcctagccgcgattgggactcaagctcctaccaccaccagcgctcccagaaagagacatgtatcctgcagcttcaagcgtccctggaatataccccaatgctttactgatgaacctgaaatctctttggcttggtacttcagcgtcaccgcccttcttatcttctgcagtacggttattgcccttgccatctacccttcccttgacctgggctggaatgctgtcaactctatggaatatcccaccttcccagaaccagacctgccagacctggttgttctaaacgcgtttcctcctcctgctcccgttcaaaatcagtttcgccctccgtcccccacgcccactgaggtcagctactttaatctaacaggcggagatgactgaaaacctagacctagaaatggacggtctctgcagcgagcaacgcacactagagaggcgccggcaaaaagagctcgagcgtcttaaacaagagctccaagacgcggtggccatacaccagtgcaaaaaaggtgtcttctgtctggtaaaacaggccacgctcacctatgaaaaaacaggtgacacccaccgcctaggatacaagctgcccacacagcgccagaagttcgccctcatgataggcgaacaacccatcaccgtgacccagcactccgtggagacagaaggctgcatacacgctccctgtaggggcgctgactgcctctacaccttgatcaaaaccctctgcggtctcagagacctcatcccttttaattaatcataactgtaatcaataaaaaatcacttacttgaaatctgatagcaagcctctgtccaattttttcagcaacacttccttcccctcctcccaactctggtactctaggcgcctcctagctgcaaacttcctccacagtctgaagggaatgtcagattcctcctcctgtccctccgcacccacgatcttcatgttgttgcagatgaaacgcgcgagatcgtctgacgagaccttcaaccccgtgtacccctacgataccgagatcgctccgacttctgtccctttccttacccctccctttgtgtcatccgcaggaatgcaagaaaatccagctggggtgctgtccctgcacttgtcagagccccttaccacccacaatggggccctgactctaaaaatggggggcggcctgaccctggacaaggaagggaatctcacttcccaaaacatcaccagtgtcgatccccctctcaaaaaaagcaagaacaacatcagccttcagaccgccgcacccctcgccgtcagctccggggccctaacactttttgccactccccccctagcggtcagtggtgacaaccttactgtgcagtctcaggcccctctcactttggaagactcaaaactaactctggccaccaaaggacccctaactgtgtccgaaggcaaacttgtcctagaaacagaggctcccctgcatgcaagtgacagcagcagcctgggccttagcgttacggccccacttagcattaacaatgacagcctaggactagacatgcaagcgcccattagctctcgagatggaaaactggctctaacagtggcggcccccctaactgtggtcgagggtatcaatgctttggcagtagccacaggtaagggtattgggctaaatgaaaccaacacacacctgcaggcaaaactggtcgcacccctaggctttgataccaacggcaacattaagctaagcgttgcaggaggcatgaggctaaacaataacacactgatactagatgtaaactacccatttgaggctcaaggccaactgagcctaagagtgggctcgggcccactatatgtagattctagtagtcataacctaaccattagatgccttaggggattgtatataacatcttctaacaaccaaaacggtctagaagccaacattaaactaacaagaggccttgtgtatgacggaaatgccatagcagttaatgttggcaaagggctggaatacagccctactgacacaacagaaaaacctatacagactaaaataggtctaggcatggagtatgataccgagggagccatgatgacaaaactaggctctggactaagctttgacaattcaggagccattgtagtgggaaacaaaaatgatgacaggcttactttgtggaccacaccggacccatcgcccaactgtcagatctactctgaaaaagatgctaaactaaccttggtactgactaaatgtggcagtcaggttgtaggcacagtatctattgccgctcttaaaggtagcctcgtgccaatcactagtgcaatcagtgtggttcaggtatacctaaggtttgatgaaaatggggtactaatgagtaactcttcacttaatggcgaatactggaattttagaaacggagactcaactaatggcacaccatatacaaacgcagtgggtttcatgcctaatctactggcctatcctaaaggtcaaactacaactgcaaaaagtaacattgtcagccaggtctacatgaatggggacgatactaaacccatgacatttacaatcaacttcaatggccttagtgaaacaggggatacccctgttagtaaatattccatgacattctcatggaggtggccaaatggaagctacatagggcacaattttgtaacaaactcctttaccttctcctacatcgcccaagaataaagaaagcacagagatgcttgtttttgatttcaaaattgtgtgcttttatttattttcagcttacagtatttccagtagtcattcaaataaagcttaatcaaactgcatgagaacccttccacatagcttaaattagcaccagtgcaaatggagaaaaatcaacatacctttttttatccagatatcagagaactctagtggtcagttttcccccaccctcccagctcacagaatacacagtcctttccccccggctggctttaaacaacactatctcattggtaacagacatattcttaggtgtaataatccacacggtctcttggcgggccaaacgctggtcggtgatgttaataaactccccaggcagctctttcaagttcacgtcgctgtccaactgctgaagcgctcgcggctccgactgcgcctctagcggaggcaacggcaacacccgatccttgatctataaaggagtagagtcataatcccccataagaatagggcggtgatgcagcaacaaggcgcgcagcaactcctgccgccgcctctccgtacggcaggaatgcaacggcgtggtggtctcctccgtgataatccgcaccgctcgcagcatcagcatcctcgtcctccgggcacagcagcgcatcctgatctcactgagatcggcgcagtaagtgcagcacaaaaccaagatgttatttaagatcccacagtgcaaagcactgtacccaaagctcatggcgggaaggacagcccccacgtgaccatcataccagatcctcaggtaaatcaaatgacgacctctcataaacacgctggacatgtacatcacctccttgggcatgtgctgattcaccacctctcgataccacaagcatcgctgattaattaaagacccctcgagcaccatcctaaaccaggaagccagcacctgaccccccgccaggcactgcagggaccccggtgaatcgcagtggcagtgaagactccagcgctcgtagccgtgaaccatagagctggtcattatatccacattggcacaacacagacacactttcatacactttttcatgattagcagctcctctctagtcaggaccatatcccaaggaatcacccactcttgaatcaaggtaaatcccacacagcagggcaggcctctcacataactcacgttatgcatagtgagcgtgtcgcaatctggaaataccggatgatcttccatcaccgaagcccgggtctccgtctcaaagggaggtaaacggtccctcgtgtagggacagtggcgggataatcgagatcgtgttgaacgtagagtcatgccaaagggaacagcggacgtactcatatttcctccagcagaaccaagtgcgcgcgtggcagctatccctgcgtcttctgtctcgccgcctgccccgttcggtgtagtagttgtaatacagccactccctgagaccgtcaaggcgctccctggcgtccggatctatgacaacaccgtcctgcagcgccgccctgatgacatccaccaccgtagagtatgccaagcccagccaggaaatgcattcactttgacagcgagagataggaggagcggggagagatggaagaaccatgatagtaaagagaacttttattccaatcgatcttctaagatatcaaagtggagatctataagatgacactggtctcctccgctgagtcgatcaaaaataacagctaaaccacaaacaacacgattggtcaaatgctccacaagggcctgcagcataaaattgcctcggaactccaccgcaagcataacatcaaagccaccgcctctatcgtgatcaagaataaaaaccccacagctatccaccagacccatatagttttcatctctccatcgtgaaaaaagatttacaagctcctcctttaaatcacctccaaccaattgaaaaagttgaaccagaccgccctccaccttcattttcagcaagcgtatcatgattgcaaaaattcaggctcctcagacacctgtataagattgagaagcggaacgttaacatcgatgtttcgctcgcgtaaatcacgcctcagtgcaagcataatataatcccacaggtcggagcggatcagcgaggacacctccccgccaggaaccaactcaacggagcctatgctgattataatacgcatattcggagctatgctaaccagcacggcccccaaataggcgtactgcataggcggcgacaaaaagtgaacagtttgggttaaaaaatcaggcaaacactcgcgcaaaaaagcaagaacatcataaccatgctcatgcaaatagatgcaagtaagctcaggaacaaccacagaaaaatgcacaatttttctctcaaacatgactgcgagccctgcaaaaaataaaaaagaaacattacacaagagtagcctgtcttacgatgggatagactactctaaccaacataagacgggccacaacatcgcccgcgtggccataaaaaaaattgtccgtgtgattaaaaagaagcacagatagctggccagtcatatccggagtcatcacgtgtgaacccgtgtagacccccgggttggacacatcggccaaagaaagaaagcggccaatgtacccaggaggaattataacactaagacgaagatacaacagaataaccccatgagggggaataacaaagttagtaggtgaataaaaacgataaacacccgaaactccctcctgcgtaggcaaaatagcaccctccccttccaaaacaacatatagcgcttccacagcagccatgacaaaagactcaaaacactcaaaagactcagtcttaccaggaaaataaaagcactctcacagcaccagcactaatcagagtgtgaagagggccaagtgccgaacgagtatatataggaataaaaaatgacgtaaatgtgtaaaggtcagaaaacgcccagaaaaatacacagaccaacgcccgaaacgaaaacccgcgaaaaaatacccagaacttcctcaacaaccgccacttccgctttctcacggtacgtcacttccgcaagaaaagcaaaactacatttcccacatgtgtaaaaacgaaaccccgccccttgtaaccgcccacaacttacatcatcaaaacgtaaactcctacgtcacccgccccgcctctccccgcccacctcattatcatattggccacaatccaaaataaggtatattat

SEQ ID NO: 82 - DNA, 37197 bp, Gorilla beringei graueri
ataatataccttattttggattgtggccaatatgataatgaggtgggcggggagaggcggggcgggtgacgtaggacgcgcgagtagggttgggaggtgtggcggaagtgtggcatttgcaagtgggaggagctcacatgcaagcttccgtcgcggaaaatgtgacgtttttgatgagcgccgcctacctccggaagtgccaattttcgcgcgcttttcaccggatatcgtagtaattttgggcgggaccatgtaagatttggccattttcgcgcgaaaagtgaaacggggaagtgaaaactgaataatagggcgttagtcatagtgcgtaatatttaccgagggccgagggactttgaccgattacgtggaggactcgcccaggtgttttttacgtgaatttccgcgttccgggtcaaagtctccgttttattgtcaccgtcatttgacgcggagggtatttaaacccgctgcgctcctcaagaggccactcttgagtgccagcgagaagagttttctcctctgctccgcttcggtgatcgaaaaatgagacacatagcctgcactccgggtcttttgtccggtcgggcggcggccgagcttttggacgctttgatcaatgatgtcctgagcgatgattttccgtctactacccactttagcccacctactcttcacgaactgtacgatctggatgtactggtggatgtgaacgatcccaacgaggaggcggtttctgcgttttttcccgagtctgcgctgttggccgctcaggagggatttgacctacacactccgccgcctattttagagtctccgctgccggagcccagtggtataccttatatgcctgaactgcttcccgaagtggtagacctgacctgccacgagcctggctttccgcccagcgacgatgatggtgagccttttgttttagactttgctgagatacctgggcacggttgcaggtcttgtgcatatcatcagagggttaccggagaccccgaggttaagtgttcgctgtgctatatgaggatgacctcttcctttatctacagtaagtttttgtctaggtgggcttttgggtaggtgggttttgtgtcagaacaggtgtaaacgttgcttgtgttttttgtacctgtaggtccggtgtccgagccagacccggagcccgaccgcgatcccgagccggatcccgagcctcctcgtagggcaagaaaattaccttctattctgtgcaagtctaagacacctgtgaggaccagcgaggcggacagcaccgactctggcacttctacctctcctcctgaaattcacccagtggttcctctgggtatacatagacctgttgctgttagagtttgcgggcgacgctctgcagtagagtgcattgaggacttgcttcacgaacccgaggaacctttggacttgagcgttaaacgccctaggcaataaaccccacctaagtaataaaccccacctaagtaataaaccctgccgcccttggttattgagatgacgcccaatgtttgcttttgaatgacttcatgtgtgtaataaaagtgagtgtgatcataggtctcttgtttgtctgggcggggcttaagggtatataagtctcttggggctaaacttggttacacttgaccccaatggaggcgtgggggtgcttggaggagtttgcggacgtgcgccgtttgctggacgagagctctagcaatacctatactatttggaggtatctgtggggctctactcaggccaagttggtctccagaattaagcaggattacaagtgcgattttgaagagctttttagttcctgcggtgagcttttgcaatccttgaatctgggccatcaggctattttccaggaaaaggttctctcgactttggatttttccactcccgggcgcaccgccgcttgtgtggcttttgtgtcttttgtgcaagataaatggagcgaggagacccacctgagtcacggctacgtactggatttcatggcgatggctctttggagggcttacaacaaatggaagattcagaaggaactgtacggttccgccctacgtcgtccacttctgtcgcgacaggggctgaggtttcccgaccatcggcagcatcagaatctggaagacgagtcggaggagcgagcggaggagaagatcagcttgagagccggcctggaccctcctcaggaggaatgaatctcccgcaggtggttgacctgtttccagaactgagacgggtcctgactatcagggaggatggtcagtttgtgaagaagtttaagagggatcggggtgagggagatgatgaggcggctagcaatttagcttttagtctgatgactcgccaccgaccggaatgtattacctatcagcagattaaggagagttgtgccaacgagctggatcttttgggtcagaagtatagcatagaacagcttaccacttactggcttcagcctggggatgattgggaagaggcgatcagggtgtatgcaaaggtggccctgcggcccgattgcaagtataagattactaagttggttaatattagaaactgctgctatatttctgggaacggggccgaagtggagatagatactcaggacagggtggcttttaggtgttgcatgataaacatgtggcccgggatactggggatggatggggtggtattcatgaatgtgaggtttacgggccccaactttaatggcacggtgttcatgggcaacaccaacttgctcctgcatggtgcgagtttctatgggtttaataacacctgtatagaggcctggaccgatgtaaaggttcgaggttgttccttttatagctgttggaaggcggtggtgtgtcgccctaaaagcaggggttctgtgaaaaaatgcttgtttgaaaggtgcaccttaggcatcctctctgagggcaactccagggtgcgccataatgtggcttcgaactgcggttgcttcatgcaagtgaagggggtgagcgttatcaagcataactcggtgtgtggaaactgcgaggatcgcgcctcccagatgctgacctgctttgatggcaactgtcacctgttgaagaccattcatataagcagccaccccagaaaggcctggcccgtgtttgagcataacatcttgacccgctgctccttgcatctgggggtcaggaggggtatgttcctgccttaccagtgtaactttagccacactaaaatcctgctggaacccgagtgcatgaccaaggtcagcctgaatggtgtgtttgatgtgactctgaaaatctggaaggtgctgaggtatgatgagaccaggaccaggtgccgaccctgcgagtgcggcggcaagcacatgagaaatcagcctgtgatgttggatgtgaccgaggagcttaggcctgaccatctggtgctggcctgcaccagggccgagtttgggtctagcgatgaggataccgattgaggtgggtaaggtgggcgtggctagaagggtggggcgtgtataaattgggggtctaagggtctctctgttttgtcttgcaacagccgccgccatgagcgacaccggcaacagctttgatggaagcatctttagcccctatctgacagtgcgcatgcctcactgggctggagtgcgtcagaatgtgatgggttccaacgtggatggacgccccgttctgccttcaaattcgtctacaatggcctacgcgaccgtgggaggaactccgctggacgccgcgacctccgccgccgcctccgccgccgccgcgaccgcgcgcagcatggctacggacctttacagctctttggtggcgagcggcgcggcctctcgcgcgtctgctcgggatgagaaactgaccgctctgctgcttaaactggaagacttgacccgggagctggctcaactgacccagcaggtctccagcttgcgtgagagcagccttgcctccccctaatggcccataatataaataaaagccagtctgtttggattaagcaagtgtatgttctttatttaactctccgcgcgcggtaagcccgggaccagcggtctcggtcgtttagggtgcggtggattctttccaacacgtggtacaggtggctctggatgtttagatacatgggcatgagtccatccctggggtggaggtagcaccactgcagagcttcgtgctcgggggtggtgttgtatatgatccagtcgtagcaggagcgctgggcgtggtgctgaaaaatgtccttaagcaagaggcttatagctagggggaggcccttggtgtaagtgtttacaaatctgctcagttgggaggggtgcatccggggggatataatgtgcatcttggactggatttttaggttggctatgttcccacccagatcccttctgggattcatgttgtgcaggaccaccagcacggtatatccagtacacttgggaaatttatcgtggagcttagacgggaatgcatggaagaacttggagacgcccttgtggcctcccagattttccatacattcgtccatgatgatggcaatgggcccgtgggaagctgcctgagcaaaaatgtttctgggatcgctcacatcgtagttatgttccagggtgaggtcatcataggacatctttacaaatcgggggcggagggtcccggactgggggatgatggtgccctcgggccccggggcgtagttcccctcacagatctgcatctcccaggctttcatttcagagggagggatcatatccacctgcggagcgatgaaaaacacagtttctggcgcaggggagattaactgggatgagagcaggtttctgagcagctgtgactttccacagccggtgggcccatatatcacgcctatcaccggctgcagctggtagttaagagagctgcagctgccgtcctcccggagcaggggggccacctcgttcagcatatccctgacgtggatgttctccctgaccaattccgccagaaggcgctcgccgcccagcgaaagcagctcttgcaaggaagcaaaatttttcagcggttttaggccgtcggccgtgggcatgtttttcagcgtctgggtcagcagttccagtctgtcccacagctcggtgatgtgctctacggcatctcgatccagcagatctcctcgtttcgcgggttggggcggctttcgctgtagggcaccagccgatgggcgtccagcggggccagagtcatgtccttccatgggcgcagggtcctcgtcagggtggtctgggtcacggtgaaggggtgcgctccgggttgggcgctggccagggtgcgcttgaggctggttctgctggtgctgaatcgctgccgctcttcgccctgcgcgtcggccaggtagcatttgaccatggtctcgtagtcgagaccctcggcggcgtgccccttggcgcggagctttcccttggaggtggcgccgcacgaggggcactgcaggctcttcagggcgtagagcttgggagcgagaaacacggactctggggagtaggcgtccgcgccgcaggaagcgcagaccgtctcgcattccaccagccaagtgagctccgggcggtcagggtcaaaaaccaggttgcccccatgctttttgatgcgtttcttacctcggctctccatgaggcggtgtcccttctcggtgacgaagaggctgtccgtgtctccgtagaccgacttcaggggcctgtcttccagcggagtgcctctgtcctcctcgtagagaaactctgaccactctgagacgaaggcccgcgtccaggccaggacgaaggaggccacgtgggaggggtagcggtcgttgtccactagcgggtccaccttctccagggtgtgcaggcacatgtccccctcctccgcgtccagaaaagtgattggcttgtaggtgtaggacacgtgaccgggggttcccgacgggggggtataaaagggggtgggcaccctttcatcttcactctcttccgcatcgctgtctgcgagagccagctgctggggtaagtattccctctcgaaggcgggcatgacctcagcgctcaggttgtcagtttctaaaaatgaggaggatttgatgttcacctgtccggaggtgatacctttgagggtacctgggtccatctggtcagaaaacactatttttttgttgtcaagcttggtggcgaacgacccgtagagggcgttggagagcagcttggcgatggagcgcagggtctggtttttgtcgcggtcggctcgctccttggccgcgatgttgagttgcacgtactcgcgggccacgcacttccactcggggaagacggtggtgcgctcgtctgggatcaggcgcaccctccagcctcggttgtgcagggtgaccatgtcgacgctggtggcgacctcgccgcgcaggcgctcgttggtccagcagaggcggccgcccttgcgcgagcagaaggggggtagggggtccagctggtcctcgtttggggggtccgcgtcgatggtgaagaccccggggagcaagcgcgggtcaaagtagtcgatcttgcaagcttgcatgtccagagcccgctgccattcgcgggcggcgagcgcgcgctcgtaggggttgaggggcgggccccagggcatggggtgggtgagcgcggaggcgtacatgccgcagatgtcatacacgtacaggggttccctgaggatgccgaggtaggtggggtagcagcgccccccgcggatgctggcgcgcacgtagtcatagagctcgtgggagggggccagcatgttgggcccgaggttggtgcgctgggggcgctcggcgcggaaggcgatctgcctgaagatggcatgggagttggaggagatggtgggccgctggaagacgttgaagcttgcttcttgcaagcccaccgagtccctgacgaagcaggcgtaggactcgcgcagcttgtgcaccagctcggcggtgacctggacgtcgagcgcgcagtagtcgagggtctcgcggatgatgtcatacttatcctcccccttctttttccacagctcgcggttgaggacgaactcttcgcggtctttccagtactcttggaggggaaacccgtccgtgtccgaacggtaagagcctagcatgtagaactggttgacggcctggtaggggcaacagcccttctccacgggcagcgcgtaggcctgcgccgccttgcggagggaggtgtgggtgagggcgaaagtgtccctgaccatgactttgaggtattgatgtttgaagtctgtgtcatcgcagccgccctgttcccacagggtgtagtccgtgcgctttttggagcgcgggttgggcagggagaaggtgaggtcattgaagaggatcttccccgctcgaggcatgaagtttctggtgatgcgaaagggccctgggaccgaggagcggttgttgatgacctgggcggccaggacgatctcgtcaaagccgtttatgttgtggcccacgatgtagagctccaaaaagcggggctggcccttgatggaggggagctttttgagttcctcgtaggtgagctcctcgggcgattccaggccgtgctcctccagggcccagtcttgcaagtgagggttggccgccaggaaggatcgccagaggtcgcgggccatgagggtctgcaggcggtcgcggaaggttctgaactgtcgccccacggccatcttttcgggggtgatgcagtagaaggtgagggggtctttctcccaggggtcccatctgagctctcgggcgaggtcgcgcgcggcggcgaccagagcctcgttgccccccagtttcatgaccagcatgaagggcacgagctgcttgccaaaggctcccatccaagtgtaggtctctacatcgtaggtgacaaagaggcgctccgtgcgaggatgagagccgatcgggaagaactggatctcccgccaccagttggaggattggctgttgatgtggtgaaagtagaagtcccgtctgcgggccgagcactcgtgctggcttttgtaaaagcgaccgcagtactggcagcgctgcacgggttgtatatcttgcacgaggtgaacctggcgacctctgacgaggaagcgcagcgggaatctaagtcccccgcctggggtcccgtgtggctggtggtcttctactttggttgtctggccgccagcatctgtctcctggagggcgatggtggagcagaccaccacgccgcgagagccgcaggtccagatctcggcgctcggcgggcggagtttgatgacgacatcgcgcacattggagctgtccatggtctccagctcccgcggcggcaggtcagctgggagttcctggaggttcacctcgcagagacgggtcaaggcgcgggcagtgttgagatggtatctgatttcaaggggcgtgttggcggcggagtcgatggcttgcaggaggccgcagccccggggggccacgatggttccccgcggggcgcgaggggaggcggaagctgggggtgtgttcagaagcggtgacgcgggcgggcccccggaggtagggggggttccggccccacaggcatgggcggcaggggcacgtcttcgccgcgcgcgggcaggggctggtgctggctccgaagagcgcttgcgtgcgcgacgacgcgacggttggtgtcctgtatctgacgcctctgagtgaagaccacgggtcccgtgaccttgaacctgaaagagagttcgacagaatcaatctcggcatcgttgacagcggcctggcgcaggatctcctgcacgtcgcccgagttgtcctggtaggcgatctctgccatgaactgctcgatctcttcttcctggagatctcctcgtccggcgcgctccacggtggccgccaggtcgttggagatgcgacccatgagctgcgagaaggcgttgagcccgccctcgttccagacccggctgtagaccacgcccccctcggcgttgcgggcgcgcatgaccacctgggccaggttgagctccacgtgtcgcgtgaagacggcgtagttgcgcaggcgctggaaaaggtagttcagggtggtggcggtgtgctcggcgacgaagaagtacatgacccagcgccgcaacgtggattcattgatgtcccccaaggcctccaggcgctccatggcctcgtagaagtccacggcgaagttgaaaaactgggagttgcgagcggacacggtcaactcctcctccagaagacggatgagctcggcgacagtgtcgcgcacctcgcgctcgaaggccacggggggcgcttcttcctcttccacctcttcttccatgatcgcttcttcttcttcctcagccgggacgggagggggcggcggcggcgggggaggggcgcggcggcggcggcggcgcaccgggaggcggtcgatgaagcgctcgatcatctccccccgcatgcggcgcatggtctcggtgacggcgcggccgttctcccgggggcgcagctcgaagacgccgcctctcatctcgccgcggggcgggcggccgtgaggtagcgagacggcgctgactatgcatcttaacaattgctgtgtaggtacaccgccgagggacctgattgagtccagatccaccggatccgaaaacctttggaggaaagcgtctatccagtcgcagtcgcaaggtaggctgagcaccgtggcgggcgggggcgggtctggagagttcctggcggagatgctgctgatgatgtaattaaagtaggcggtcttgagaaggcggatggtggacaggagcaccatgtctttgggtccggcctgttggatgcggaggcggtcggccatgccccaggcctcgttctgacaccggcgcaggtctttgtagtagtcttgcatgagtctttccaccggcacctcttctccttcctcttctccatctcgccggtggtttctcgcgccgcccatgcgcgtgaccccaaagcccctgagcggctgcagcagggccaggtcggcgaccacgcgctcggccaagatggcctgctgcacctgagtgagggtcctctcgaagtcatccatgtccacgaagcggtggtaggcgcccgtgttgatggtgtaggtgcagttggccatgacggaccagttgacggtctggtgtcccggctgcgagagctccgtgtaccgcaggcgcgagaaggcgcgggaatcgaacacgtagtcgttgcaagtccgcaccagatactggtagcccaccaggaagtgcggcggaggttggcgatagaggggccagcgctgggtggcgggggcgccgggcgccaggttttccagcatgaggcggtggtatccgtagatgtacctggacatccaggtgatgccggcggcggtggtggtggcgcgcgcgtagtcgcggacccggttccagatgtttcgcaggggcgagaagtgttccatggtcggcacgctctggccggtgaggcgcgcgcagtcgttgacgctctatacacacacaaaaacgaaagcgtttacagggctttcgttctgtagcctggaggaaagtaaatgggttgggttgcggtgtgccccggttcgagaccaagctgagctcggccggctgaagccgcagctaacgtggtattggcagtcccgtctcgacccaggccctgtatcctccaggatacggtcgagagcccttttgctttcttggccaagcgcccgtggcgcgatctgggatagatggtcgcgatgagaggacaaaagcggctcgcttccgtagtctggagaaacaatcgccagggttgcgttgcggcgtaccccggttcgagcccctatggcggcttgaatcggccggaaccgcggctaacgagggccgtggcagccccgtcctcaggaccccgccagccgacttctccagttacgggagcgagccccttttgttttttattttttagatgcatcccgtgctgcggcagatgcgcccctcgccccggcccgatcagcagcagcaacagcaggcatgcagacccccctctcccctttccgccccggtcaccacggccgcggcggccgtgtcgggcgcggggggcgcgctggagtcagatgagccaccgcggcggcgacctaggcagtatctggacttggaagagggcgagggactggcgcggctgggggcgaactctccagagcgccacccgcgggtgcagttgaaaagggacgcgcgcgaggcgtacctgccgcggcagaacctgtttcgcgaccgcgggggcgaggagcccgaggagatgcgagactgcaggttccaagcggggcgcgagctgcggcgcgggctggacagacagcgcctgctgcgcgaggaggactttgagcccgacacgcagacgggcatcagccccgcgcgcgcgcacgtagccgcggccgacctggtgaccgcctacgagcagacggtgaaccaggagcgcaacttccaaaagagcttcaacaaccacgtgcgcacgctggtggcgcgcgaggaggtgaccctgggtctcatgcatctgtgggacctggtggaggcgatcgtgcagaaccccagcagcaagcccctgaccgcgcagctgttcctggtggtgcagcacagcagggacaacgaggccttcagggaggcgctgctgaacatcaccgagccggaggggcgctggctcctggacctgataaacatcctgcagagcatagtggtgcaggagcgcagcctgagcctggccgagaaggtggcggccatcaactactctatgctgagcctgggcaagttctacgcccgcaagatctacaagaccccctacgtgcccatagacaaggaggtgaagatagacagcttctacatgcgcatggcgctgaaggtgctgaccctgagcgacgacctgggagtgtaccgcaacgagcgcatccacaaggccgtgagcgccagccggcggcgcgagctgagcgaccgcgagctgatgcacagtctgcagcgcgcgctgaccggcgcgggcgagggcgacagggaggtcgagtcctacttcgacatgggggccgacctgcactggcagccgagccgccgcgccctggaggcggcgggggcgtacggcggccccctggcggccgatgaccaggaagaggaggactatgagctagaggagggcgagtacctggaggactgacctggctggtggtgttttggtatagatgcaagatccgaacgtggcggacccggcggtccgggcggcgctgcaaagccagccgtccggcattaactcctctgacgactgggccgcggccatgggtcgcatcatggccctgaccgcgcgcaaccccgaggctttcaggcagcagcctcaggccaaccggctggcggccatcttggaagcggtagtgcccgcgcgctccaaccccacccacgagaaggtgctggccatagtcaacgcgctggcggagagcagggccatccgcgcggacgaggccggactggtgtacgatgcgctgctgcagcgggtggcgcggtacaacagcggcaacgtgcagaccaacctggaccgcctggtgacggacgtgcgcgaggccgtggcgcagcgcgagcgcttgcatcaggacggtaacctgggctcgctggtggcgctaaacgccttcctcagcacccagccggccaacgtaccgcgggggcaggaggactacaccaactttttgagcgcgctgcggctgatggtgaccgaggtccctcagagcgaggtgtaccagtcggggcccgactacttcttccagaccagcagacagggcttgcaaaccgtgaacctgagccaggctttcaagaacctgcgggggctgtggggagtgaaggcgcccaccggcgaccgggctacggtgtccagcctgctaacccccaactcgcgcctgctgctgctgctgatcgcgcccttcacggacagcgggagcgtctcgcgggagacctatctgggccacctgctgacgctgtaccgcgaggccatcgggcaggcgcaggtggacgagcacaccttccaagagatcaccagcgtgagccacgcgctggggcaggaggacacgggcagcctgcaggcgaccctgaactacctgctgaccaacaggcggcagaagattcccacgctgcacagcctgacccaggaggaggagcgcatcttgcgctacgtgcagcagagcgtgagcctgaacctgatgcgcgacggcgtgacgcccagcgtggcgctggacatgaccgcgcgcaacatggaaccgggcatgtacgcctcccaccggccgttcatcaaccgcctgatggactacttgcatcgggcggcggccgtgaaccccgagtacttcactaatgccattctgaatccccactggatgccccctccgggtttctacaacggggactttgaggtgcccgaggtcaacgacgggttcctctgggatgacatggatgacagtgtgttctcacccaacccgctgcgcgccgcgtctctgcgattgaaggagggctctgacagggaaggaccgagaagtctggcctcctccctggctctgggagcggtgggcgccacgggcgcggcggcgcggggcagtagccccttccccagcctggcagactctctgaacagcgggcgggtgagcaggccccgcttgctaggcgaggaggagtatctgaacaactccctgctgcagcccgcgagggacaagaacgctcagcggcagcagtttcccaacaatgggatagagagcctggtggacaagatgtccagatggaagacgtatgcgcaggagtacaaggagtgggaggaccgccagccgcggcccttgccgccccctaggcagcgctggcagcggcgcgcgtccaaccgccgctggaggcaggggcccgaggacgatgatgactctgcagatgacagcagcgtgttggacctgggcgggagcgggaaccccttttcgcacctgcgcccacgcctgggcaagatgttttaaaagaaaaaaaaaaaaataaaactcaccaaggccatggcgacgagcgttggttttttgttcccttccttagtatgcggcgcgcggcgatgttcgaggaggggcctcccccctcttacgagagcgcgatggggatttctcctgcggcgcccctgcagcctccctacgtgcctcctcggtacctgcaacctacaggggggagaaatagcatctgttactctgagctgcagcccctgtacgataccaccagactgtacctggtggacaacaagtccgcggacgtggcctccctgaactaccagaacgaccacagcgattttttgaccacggtgatccaaaacaacgacttcaccccaaccgaggccagcactcagaccataaacctggataacaggtcgaactggggcggcgacctgaagaccatcttgcacaccaacatgcccaacgtgaacgagttcatgttcaccaactcttttaaggcgcgggtgatggtggcgcgcgagcagggggaggcgaagtacgagtgggtggacttcacgctgcccgagggcaactactcagagaccatgactctcgacctgatgaacaatgcgatcgtggaacactatctgaaagtgggcaggcagaacggggtgaaggaaagcgatatcggggtcaagtttgacaccagaaacttccgtctgggctgggaccccgtgaccgggctggtcatgccgggggtctacaccaacgaggcctttcatcccgacatagtgcttctgcccggctgtggggtggacttcacccagagccggctgagcaacctgctgggcattcgcaagcggcagcctttccaggagggtttcaagatcacctatgaggatctgaaggggggcaacattcccgcgctccttgatctggacgcctacgaggagagcttgaaacccgaggagagcgctggcgacagcggcgagagtggcgaggagcaagccggcggcggtggcggcgcgtcggtagaaaacgaaagtacgcccgcagtggcggcggacgctgcggaggtcgagccggaggccatgcagcaggacgcagaggagggcgcacaggagggcgcgcagaaggacatgaacgatggggagatcaggggagacacattcgccacccggggcgaagaaaaagaggcagaggcggcggcggcggcgacggcggaggccgaaaccgaggttgaggcagaggcagagcccgagaccgaagttatggaagacatgaatgatggagaacgtaggggcgacacgttcgccacccggggcgaagagaaggcggcggaggcagaagccgcggctgaggaggcggctgcggctgcggccaagactgaggctgcggctaaggctgaggtcgaagccaatgttgcggttgaggctcaggctgaggaggaggcggcggctgaagcagttaaggaaaaggcccaggcagagcaggaagagaaaaaacctgtcattcaacctctaaaagaagatagcaaaaagcgcagttacaacgtcatcgagggcagcacctttacccagtaccgcagctggtacctggcgtacaactacggcgacccggtcaagggggtgcgctcgtggaccctgctctgcacgccggacgtcacctgcggctccgagcagatgtactggtcgctgccgaacatgatgcaagacccggtgaccttccgctccacgcggcaggttagcaacttcccggtggtgggcgccgaactgctgcccgtgcactccaagagtttttacaacgagcaggccgtctactcccagctgatccgccaggccacctctctgacccacgtgttcaatcgctttcccgagaaccagattttggcgcgcccgccggcccccaccatcaccaccgtgagtgaaaacgttcctgccctcacagatcacgggacgctaccgctgcgcaacagcatctcaggagtccagcgagtgaccattactgacgccagacgccggacctgcccctacgtttacaaggccttgggcatagtctcgccgcgcgtcctctccagtcgcactttttaaaacacatctacccacacgttccaaaatcatgtccgtactcatctcacccagcaacaacaccggctgggggctgcgcgcgcccagcaagatgtttggaggggcgaggaagcgctccgaccagcaccctgtgcgcgtgcgcggccactaccgcgcgccctggggagcgcacaagcgcgggcgcacagggcgcaccactgtggacgacgtcattgactccgtagtggagcaagcgcgccactacacacccggcgcgccgaccgcccccgccgtgtccaccgtggaccaggcgatcgaaagcgtggtacagggcgcgcggcactatgccaaccttaaaagtcgccgccgccgcgtggcccgccgccatcgccggagaccccgggccaccgccgccgcgcgccttactaaggctctgctcaggcgcgccaggcgaactggccaccgggccgccatgagggccgcacggcgggctgccgctgccgcaagcgccgtggccccgcgggcacgaaggcgcgcggccgccgccgccgccgccgccatttccagcttggcctcgacgcggcgcggtaacatatactgggtgcgcgactcggtaaccggcacgcgggtacccgtgcgctttcgccccccgcggaattagcacaagacaacatacacactgagtctcctgctgttgtgtatcccagcggcgaccgtcagcagcggcgacatgtccaagcgcaaaattaaagaagagatgctccaggtcatcgcgccggagatctatgggcccccgaagaaggaggaggatgattacaagccccgcaagctaaagcgggtcaaaaagaaaaagaaagatgatgatgatgacgaggcggtggagtttgtccgccgcatggcacccaggcgccccgtgcagtggaagggccggcgcgtgcagcgcgttttgcgccccggcaccgcggtggtcttcacgcccggcgagcgctccacgcgcactttcaagcgggtgtacgatgaggtgtacggcgacgaggacctgttggagcaggccaaccagcgctttggggagtttgcatatgggaaacggccccgcgagagtctaaaagaggacctgctggcgctaccgctggacgagggcaatcccaccccgagtctgaagccggtaaccctgcaacaggtgctgcctttgagcgcgcccagcgagcataagcgagggttgaagcgcgaaggcggggacctggcgcccaccgtgcagttgatggtgcccaagcggcagaagctggaggacgtgctggagaaaatgaaagtagagcccgggatccagcccgagatcaaggtccgccccatcaagcaggtggcgcccggcgtgggagtccagaccgtggacgttaggattcccacggaggagatggaaacccaaaccgccactccctcttcggcggccagcgccaccaccggcaccgcttcggtagaggtgcagacggacccctggctacccgccaccgctgttgccgccgccgccccccgttcgcgcgggcgcaagagaaattatccagcggccagcgcgctcatgccccagtacgcactgcatccatccatcgcgcccacccccggctaccgcgggtactcgtaccgcccgcgcagatcagccggcactcgcggccgccgccgccgtgcgaccacaaccagccgccgccgtcgccgccgccgccagccagtgctgacccccgtgtctgtaaggaaggtggctcgctcggggagcacgctggtggtgcccagagcgcgctaccaccccagcatcgtttaaagccggtctctgtatggttcttgcagatatggccctcacttgtcgcctccgcttcccggtgccgggataccgaggaagaactcaccgccgcagaggcatggcgggcagcggtctccgcggcggccgtcgccatcgccggcgcgcaaaaagcaggcgcatgcgcggcggtgtgctgcctctgctaatcccgctaatcgccgcggcgatcggtgccgtacccgggatcgcctccgtggccctgcaggcgtcccagaaacgttgactcttgcaaccttgcaagcttgcattttttggaggaaaaaataaaaaaagtctagactctcacgctcgcttggtcctgtgactattttgtagaaaaaagatggaagacatcaactttgcgtcgctggccccgcgtcacggctcgcgcccgttcatgggagactggacagatatcggcaccagcaatatgagcggtggcgccttcagctggggcagtctgtggagcggccttaaaaattttggttccaccattaagaactatggcaacaaagcgtggaacagcagcacgggccagatgctgagagacaagttgaaagagcagaacttccaggagaaggtggcgcagggcctggcctctggcatcagcggggtggtggacatagctaaccaggccgtgcagaaaaagataaacagtcatctggacccccgtcctcaggtggaggaaatgcctccagcgatggagacggtgtctcccgagggcaaaggcgaaaagcgcccgcggcccgacagagaagagaccctggtgtcacacaccgaggagccgccctcttacgaggaggcagtcaaggccggcctgcccaccactcgccccatagcccccatggccaccggtgtggtgggccacaggcaacacactcccgcaacactagatctgcccccgccgtccgagccgccgcgccagccaaaggcggcgacggtgcccgctccctccacttccgccgccaacagagtgcccctgcgccgcgccgcgagcggcccccgggcctcgcgagttagcggcaactggcagagcacactgaacagcatcgtgggcctgggagtgaggagtgtgaagcgccgccgttgctactgaatgagcaagctagctaacgtgttgtatgtgtgtatgcgtcctatgtcgccgccagaggagctgttgagccgccggcgccgtctgcactccagcgaatttcaagatggcgaccccatcgatgatgcctcagtggtcgtacatgcacatctcgggccaggacgcttcggagtacctgagccccgggctggtgcagttcgcccgcgccacagacacctacttcaacatgagtaacaagttcaggaaccccactgtggcgcccacccacgatgtgaccacggaccggtcgcagcgcctgacgctgcggttcatccccgtggatcgggaggacaccgcctactcttacaaggcgcggttcacgctggccgtgggcgacaaccgcgtgctggacatggcctccacttactttgacatcaggggggtgctggacaggggccccaccttcaagccctactcgggtactgcctacaactccctggcccccaagggcgctcccaattcttgcgagtgggaacaagaggaaaatcaggtggtcgctgcagatgatgaacttgaagatgaagaagcgcaagctcaagaggacgccccagctaaaaaaattcatgtatatgcccaggcgcctcttgctggcgaaaagattaccaaggatggtttgcaaataggtactgaagttgtaggagatacatctaaggacacttttgcagacaaaacattccaacccgaacctcagataggcgagtctcagtggaacgaggctgatgccacagtagcaggaggcagagtcttgaaaaaaaccacccctatgagaccttgctatggatcctatgccaggcctacaaatgccaacgggggtcaaggaattatggttgccaatgaacaaggagtgttggagtctaaagtggagatgcaatttttttctaacactacaacccttaatgcgcgggatggagctggcaatcccgaaccaaaggtggtgttgtacagtgaagatgtccacttggaatctcctgacactcatttgtcttacaagcccaaaaaggatgatgttaatgctaaaattatgttgggtcagcaagctatggctaacaggcccaacctcattgcttttagagataatttcattggactcatgtactacaacagcactggtaacatgggagtgctggcgggtcaggcctctcagttgaatgccgtggtggacctgcaggatagaaacacagaactgtcatatcagcttatgcttgattccattggggatagatccagatacttctccatgtggaaccaggcagtggatagctatgacccagatgtcagaatcattgaaaaccatggtgtcgaggacgagctacccaactactgcttccctctgggcggcataggaattactgatacttatcaagggatcaaaaataccaatggcaatggtcagtggaccaaagatgatcagttcgcggaccgtaatgaaataggggtgggaaacaacttcgccatggagatcaacatccaggccaacctctggaggaacttcctctatgcgaacgtggggctctacctgccagacaagctcaagtacaaccccaccaacgtggacatctctgacaaccccaacacctatgactacatgaacaagcgtgtggtggctcccggcctggtggactgctttgtcaatgtgggagccaggtggtccctggactacatggacaacgtcaaccccttcaaccaccaccgcaatgcgggtctgcgctaccgctccatgatcctgggcaacgggcgctacgtgcccttccacattcaggtgccccagaagttctttgccatcaagaacctcctcctcctgccgggctcctacacttacgagtggaacttcaggaaggatgtcaacatggtcctgcagagctctctgggcaatgaccttagggtggacggggccagcatcaagtttgacagcgtcaccctctatgctaccttcttccccatggctcacaacaccgcctccacgctcgaggccatgctgaggaacgacaccaacgaccagtccttcaatgactacctctctggggccaacatgctctaccccatccccgccaaggccaccaacgtgcccatctccattccctctcgcaactgggccgccttcagaggctgggcctttacccgccttaagaccaaggaaaccccctccctgggctcgggttttgacccctactttgtctactcgggatccatcccctacctggatggcaccttctacctcaaccacacttttaagaagatatccatcatgtatgactcctccgtcagctggccgggcaatgaccgcctgctcacccccaatgagttcgaggtcaagcgcgccgtggacggcgagggctacaacgtggcccagtgcaacatgaccaaggactggttcctggtgcagatgctggccaactacaacataggctaccagggcttctacatcccagagagctacaaggacaggatgtactccttcttcagaaatttccaacccatgagcaggcaggtggtggacgagaccaaatacaaggactatcaggccattggcatcactcaccagcacaacaactcgggattcgtgggctacctggctcccaccatgcgcgaggggcaggcctaccccgccaacttcccctacccgttgataggcaagaccgcggtcgacagcgtcacccagaaaaagttcctctgcgaccgcaccctctggcgcatccccttctctagcaacttcatgtccatgggtgcgctcacggacctgggccagaacctgctctatgccaactccgcccatgcgctggacatgacttttgaggtggaccccatggacgagcccacccttctctatattgtgtttgaagtgttcgacgtggtcagagtgcaccagccgcaccgcggtgtcatcgagaccgtgtacctgcgcacgcccttctcggccggcaacgccaccacctaaggagacagcgccgccgcctgcatgacgggttccaccgagcaagagctcagggccatcgccagagacctgggatgcggaccctattttttgggcacctatgacaaacgcttcccgggcttcatctcccgagacaagctcgcctgcgccatcgtcaacacggccgcgcgcgagaccgggggcgtgcactggctggcctttggctgggacccgcgctccaaaacctgctacctcttcgacccctttggcttctccgatcagcgcctcagacagatctatgagtttgagtacgaggggctgctgcgccgcagcgcgcttgcctcctcgcccgaccgctgcatcacccttgagaagtccaccgagaccgtgcaggggccccactcggccgcctgcggtctcttctgctgcatgtttttgcacgcctttgtgcgctggccccagagtcccatggatcgcaaccccaccatgaacttgctcaagggagtgcccaacgccatgctccagagcccccaggtccagcccaccctgcgccacaaccaggaacagctctaccgcttcctggagcgccactccccctacttccgcagtcacagcgcgcacatccggggggccacctctttctgccacttgcaacaaaacatgcaagacggaaaatgatgtacagctcgctttttaataaatgtaaagactgtgcactttatttatacacgggctctttctggttatttattcaacaccgccgtcgccatctagaaatcgaaagggttctgccgcgcgtcgccgtgcgccacgggcagagacacgttgcgatactggaagcggctcgcccacttgaactcgggcaccaccatgcggggcagtggctcctcggggaagttctcgccccacagggtgcgggtcagctgcagcgcgctcaggaggtcgggagccgagatcttgaagtcgcagttggggccggaaccctgcgcgcgcgagttgcggtacacggggttgcagcactggaacaccagcagggccggattacgcacgctggccagcaggctctcgtcgctgatcatgtcgctgtccagatcctccgcgttgctcagggcgaatggggtcatcttgcagacctgcctgcccaggaaaggcggcagcccgggcttgccgttgcagtcgcagcgcaggggcatcagcaggtgcccgtggcccgtctgcgcctgcgggtacagcgcgcgcatgaaggcttcgatctgcctgaaagccacctgcgtcttggctccctccgaaaagaacatcccacaggacttgctggagaactggttcgcgggacagctggcatcgtgcaggcagcagcgcgcgtcggtgttggcgatctgcaccacgttgcgaccccaccggttcttcactatcttggccttggaagcctgctccttcagcgcgcgctggccgttctcgctggtcacatccatctctatcacctgctccttgttgatcatgtttgtcccgtgcagacacttcaggtcgccctccgtctgggtgcagcggtgctcccacagcgcgcaaccggtgggctcccaatttttgtgggtcacccccgcgtaggcctgcaggtaggcctgcaagaagcgccccatcatggccacaaaggtcttctggctcgtaaaggtcagctgcaggccgcgatgctcttcgttcagccaggtcttgcagatggcggccagcgcctcggtctgctcgggcagcatcctaaaatttgtcttcaggtcgttatccacgtggtacttgtccatcatggcgcgcgccgcctccatgcccttctcccaggcggacaccatgggcaggcttagggggtttatcacttccaccggcgaggacaccgtactttcgatttcttcttcctccccctcttcccggcgcgcgcccacgctgctgcgcgctctcaccgcctgcaccaaggggtcgtcttcaggcaagcgccgcaccgagcgcttgccgcccttgacctgcttaatcagcaccggcgggttgctgaagcccaccatggtcagctccgcctgctcttcttcgtcttcgctgtctaccactatctctggggaagggcttctccgctctgcggcggtgcgcttcttttttttcttgggagcagccgtgacggagtccgccacggcgacggaggtcgagggcgtggggctgggggtgcgcggtaccagggcctcgtcgccctcggactcttcctctgactccaggcggcggcggagacgcttctttgggggcgcgcgcgtcagcggcggcggagacggggacggggacggggacgggacgccctccacagggggtggtcttcgcgcagacccgcggccgcgctcgggggtcttttcgagctggtcttggtcccgactggccattgtatcctcctcctcctaggcagagagacataaggagtctatcatgcaagtcgagaaggaggagagcttaaccaccccctctgagaccgccgatgcgcccgccgtcgccgtcgcccccgctgccgccgacgcgcccgccacaccgagcgacacccccgcggaccccccagccgacgcacccctgttcgaggaagcggccgtggagcaggacccgggctttgtctcggcagaggaggatttgcgagaggaggaggataaggagaagaagccctcagtgccaaaagatgataaagagcaagacgagcacgacgcagatgcacaccagggtgaagtcgggcggggggacggagggcatgacggcgccgactacctagacgaagggaacgacgtgctcttgaagcacctgcatcgtcagtgcgccatcgtttgcgacgctctgcaggagcgcagcgaagtgcccctcagcgtggcggaggtcagccacgcctacgagctcagcctcttctccccccgggtgcccccccgccgccgcgaaaacggcacatgcgagcccaacccgcgcctcaacttctaccccgcctttgtggtgcccgaggtcctggccacctatcacatcttctttcaaaattgcaagatccccctctcgtgccgcgccaaccgtagccgcgccgataagatgctggccctgcgccagggcgaccacatacctgatatcgccgctttggaagatgtgccaaagatcttcgagggtctgggtcgcaacgagaagcgggcagcaaactctctgcaacaggaaaacagcgaaaatgagagtcacaccggggtactggtggagctcgagggcgacaacgcccgcctggcggtggtcaagcgcagcatcgaggtcacccactttgcctaccccgcgctcaacctgccccccaaagtcatgaacgcggccatggacgggctgatcatgcgccgcggccggcccctcgctccagatgcaaacttgcatgaggagaccgaggacggccagcccgtggtcagcgacgagcagctggcgcgctggctggagaccgcggaccccgccgaactggaggagcggcgcaagatgatgatggccgcggtgctggtcaccgtagagctggagtgtctgcagcgcttcttcggcgaccccgagatgcagagaaaggtcgaggagaccctgcactacaccttccgccagggctacgtgcgccaggcttgcaagatctccaacgtggagctcagcaacctggtgtcctacctgggcatcttgcatgagaaccgcctcgggcagagcgtgctgcactccaccctgcgcggggaggcgcgccgcgactacgtgcgcgactgcgtttacctcttcctctgctacacctggcagacggccatgggggtctggcagcagtgcctggaggagcgcaacctcaaggagctggagaagctcctgcagcgcgcgctcaaagacctctggacgggctacaacgagcgctcggtggccgccgcgctggccgacctcatcttccccgagcgcctgctcaaaaccctccagcaggggctgcccgacttcaccagccaaagcatgttgcaaaacttcaggaactttatcctggagcgttctggcatcctacccgccacctgctgcgccctgcccagcgactttgtccccctcgtgtaccgcgagtgccccccgccgctgtggggtcactgctacctgttccaactggccaactacctgtcctaccacgcggacctcatggaggactccagcggcgaggggctcatggagtgccactgccgctgcaacctctgcacgccccaccgctccctggtctgcaacacccaactgctcagcgagagtcagattatcggtaccttcgagctacagggtccgtcctcctcagacgagaagtccgcggctccggggctaaaactcactccggggctgtggacttccgcctacctgcgcaaatttgtacctgaagactaccacgcccacgagatcaggttttacgaagaccaatcccgcccgcccaaggcggagctgaccgcctgcgtcatcacccagggcgagatcctaggccaattgcaagccatccaaaaagcccgccaagattttttgctgagaaagggtcggggggtgtatctggacccccagtcgggtgaggagctcaacccggttcccccgctgccgccgccgcgggaccttgcttcccaggataagcatcgccatggctcccagaaagaagcagcagcggccgccactgccgccaccccacatgctggaggaagaggaggaatactgggacagtcaggcagaggaggtttcggacgaggaggagccggagacggagatggaagagtgggaggaggacagcttagacgaggaggcttccgaagccgaagaggcagacgcaacaccgtcaccctcggccgcagccccctcgcaggcgcccccgaagtccgctcccagcatcagcagcaacagcagcgctataacctccgctcctccaccgccgcgacccacggccgaccgcagacccaaccgtagatgggacaccaccggaaccggggccggtaagtcctccgggagaggcaagcaagcgcagcgccaaggctaccgctcgtggcgcgctcacaagaacgccatagtcgcttgcttgcaagactgcggggggaacatctccttcgcccgccgcttcctgctcttccaccacggtgtggccttcccccgtaacgtcctgcattactaccgtcatctctacagcccctactgcggcggcagtgagccagagacggtcggcggcggcggcggcgcccgtttcggcgcctaggaagacccagggcaagacttcagccaagaaactcgcggcggccgcggcgaacgcggtcgcgggggccctgcgcctgacggtgaacgaacccctgtcgacccgcgaactgagaaaccgaatcttccccactctctatgccatcttccagcagagcagagggcaggatcaggaactgaaagtaaaaaacaggtctctgcgctccctcacccgcagctgtctgtatcacaagagcgaagaccagcttcggcgcacgctggaggacgctgaggcactcttcagcaaatactgcgcgctcactcttaaggactagctccgcgcccttctcgaatttaggcgggaacgcctacgtcatcgcagcgccgccgtcatgagcaaggacattcccacgccatacatgtggagctatcagccgcagatgggactcgcggcgggcgcctcccaagactactccacccgcatgaactggctcagtgccggcccacacatgatctcacaggttaatgatatccgcacccatcgaaaccaaatattggtggagcaggcggcaattaccaccacgccccgcaataatcccaaccccagggagtggcccgcgtccctggtgtatcaggaaattcccggccccaccaccgtactacttccgcgtgattcccaggccgaagtccaaatgactaactcaggggcgcagctcgcgggcggctgtcgtcacagggtgcggcctcctcgccagggtataactcacctggagatccgaggcagaggtattcagctcaacgacgagtcggtgagctcctcgctcggtctaagacctgacgggaccttccagatagccggagccggccgatcttccttcacgccccgccaggcgtacctgactctgcagagctcgtcctcggcgccgcgctcgggcggcatcgggactctccagttcgtgcaggagtttgtgccctcggtctacttcaaccccttctcgggctctcccggtcgctacccggaccagttcatctcgaactttgacgccgcgagggactcggtggacggctacgactgaatgtcgggtggacccggtgcagagcaacttcgcctgaagcacctcgaccactgccgccgccctcagtgctttgcccgctgtcagaccggtgagttccagtacttttccctgcccgactcgcacccggacggcccggcgcacggggtgcgctttttcatcccgagtcaggtgcgctctaccctaatcagggagtttaccgcccgtcccctactggcggagttggaaaaggggccttctatcctaaccattgcctgcatctgctctaaccctggattgcaccaagatctttgctgtcatttgtgtgctgagtataataaaggctgagatcagaatctactcgggctcctgtcgccatcctgtcaacgccaccgtccaagcccggcccgatcagcccgaggtgaacctcacctgcggtctgcaccggcgcctgaggaaatacctagcttggtactacaacagcactccctttgtggtttacaacagctttgaccaggacggggtctcactgagggataacctctcgaacctgagctactccatcaggaagaacagcaccctcgagctacttcctccttacctgcccgggacttaccagtgtgtcaccggtccctgcacccacacccacctgttgatcgtaaacgactctcttccgagaacagacctcaataactcctcttcgcagttccccagaacaggaggtgagctcaggaaaccccgggtaaagaagggtggacaagagttaacacttgtggggtttctggtgtatgtgacgctggtggtggctcttttgattaaggcttttccttccatgtctgaactctccctcttttatgaacaactcgactagtgctaacgggaccctacccaacgaatcgggattgaatatcggtaaccaggttgcagtttcacttttgattaccttcatagtcctcttcctgctagtgctgtcgcttctgtgcctgcggatcgggggctgctgcatccacgtttatatctggtgctggctgtttagaaggttcggagaccatcgcaggtagaataaacatgctgctgcttaccctctttgtcctggcgctggccgccagctgccaagccttttccgaggctgactttatagagccccagtgtaacgtgacttttaaagcccatgcacagcgttgtcatactataatcaaatgtgccaccgaacacgatgaataccttatccagtataaagataaatcacacaaagtggcacttgttgacatctggaaacccgaagaccctttggaatacaatgtgaccgttttccagggtgacctcttcaaaatttacaattacactttcccatttgaccagatgtgtgactttgtcatgtacatggaaaagcagcacaagctgtggcctccgactccccagggctgtgtggaaaatccaggctctttctgcatgatctctctctgtgtaactgtgctggcactaatactcacgcttttgtatatcagatttaaatcaaggcaaagcttcatcgatgaaaagaaaatgccttaaacgctttcacgcttgattgctaacaccgggtttttatccgcagaatgattggaatcaccctactaatcacctccctccttgcgattgcccatgggttggaacgaatcgaagcccctgtgggggccaatgttaccctggtggggcctgtcggcaatgctacattaatgtgggaaaaatatactaaaaatcaatgggtctcttactgcactaacaaaaacagccacaagcccagagccatctgcgatgggcaaaatctaaccttgattgatgttcaaatgctggatgcgggctactattatgggcagctgggtacaatgattaattactggagaccccacaaagattacatgctccacgtagtaaagggtccccttagcagcccacccactaccacctctactacccccactaccaccactactcccaccaccagcactgccgcccagcctcctcatagcagaacaaccacttttatcaattccaagtcccactccccccacattgccggcgggccctccgcctcagactccgagaccaccgagatctgcttctgcaaatgctctgacgcctttgctgaggatttggaagaccacgaggaagatgagcatgacttcgcagatgcatgccaggcatcagaggcagaagcgctgccggtggccctcaaacagtatgcagacccccacaccacccccaaccttcctccaccttcccagaagccaagtttcctgggggaaaatgaaactctgcctctctccatactcgctctgacatctgttgctatgttgaccgctctgctggtgcttctatgctctatatgctacctgatctgctgcagaaagaaaaaatctcacggccatgctcaccagcccctcatgcacttcccttaccctccagagctgggcgaccacaaactttaagtctgcagtaactatctgcccatcccttgtcagtcgacagcgatgagccccactaatctaacggcctctggacttacaacatcgtctcttaatgagaccaccgctcctcaagacctgtacgatggtgtctccgcgctggttaaccagtgggatcacctgggcatatggtggctcctcataggagcagtgaccctgtgcctaatcctggtctggatcatctgctgcatcaaaagcagaagacccaggcggcggcccatctacaggccctttgtcatcacacctgaagatgatgatgacaccacttccaggctgcagaggctaaagcagctactcttctcttttacagcatggtaaattgaatcatgcctcgcattttcatctacttgtctctccttccactttttctgggctcttctacattggccgctgtgtcccacatcgaggtagactgcctcacgcccttcacagtctacctgcttttcggctttgtcatctgcacctttgtctgcagcgttatcactgtagtgatctgcttcatacagtgcatcgactacgtctgcgtgcgggtggcttactttagacaccacccccagtatcgcaacagggacatagcggctctcctaagacttgtttaaaatcatggccaaattaactgtgattggtcttctgatcatctgctgcgtcctagccgcgattgggactcaagctcctaccaccaccagcgctcccagaaagagacatgtatcctgcagcttcaagcgtccctggaatataccccaatgctttactgatgaacctgaaatctctttggcttggtacttcagcgtcaccgcccttcttatcttctgcagtacggttattgcccttgccatctacccttcccttgacctgggctggaatgctgtcaactctatggaatatcccaccttcccagaaccagacctgccagacctggttgttctaaacgcgtttcctcctcctgctcccgttcaaaatcagtttcgccctccgtcccccacgcccactgaggtcagctactttaatctaacaggcggagatgactgaaaacctagacctagaaatggacggtctctgcagcgagcaacgcacactagagaggcgccggcaaaaagagctcgagcgtcttaaacaagagctccaagacgcggtggccatacaccagtgcaaaaaaggtgtcttctgtctggtaaaacaggccacgctcacctatgaaaaaacaggtgacacccaccgcctaggatacaagctgcccacacagcgccagaagttcgccctcatgataggcgaacaacccatcaccgtgacccagcactccgtggagacagaaggctgcatacacgctccctgtaggggcgctgactgcctctacaccttgatcaaaaccctctgcggtctcagagacctcatcccttttaattaatcataactgtaatcaataaaaaatcacttacttgaaatctgatagcaagcctctgtccaattttttcagcaacacttccttcccctcctcccaactctggtactctaggcgcctcctagctgcaaacttcctccacagtctgaagggaatgtcagattcctcctcctgtccctccgcacccacgatcttcatgttgttgcagatgaaacgcgcgagatcgtctgacgagaccttcaaccccgtgtacccctacgataccgagatcgctccgacttctgtccctttccttacccctccctttgtgtcatccgcaggaatgcaagaaaatccagctggggtgctgtccctgcacttgtcagagccccttaccacccacaatggggccctgactctaaaaatggggggcggcctgaccctggacaaggaagggaatctcacttcccaaaacatcaccagtgtcgatccccctctcaaaaaaagcaagaacaacatcagccttcagaccgccgcacccctcgccgtcagctccggggccctaacactttttgccactccccccctagcggtcagtggtgacaaccttactgtgcagtctcaggcccctctcactttggaagactcaaaactaactctggccaccaaaggacccctaactgtgtccgaaggcaaacttgtcctagaaacagaggctcccctgcatgcaagtgacagcagcagcctgggccttagcgttacggccccacttagcattaacaatgacagcctaggactagacatgcaagcgcccattagctctcgagatggaaaactggctctaacagtggcggcccccctaactgtggtcgagggtatcaatgctttggcagtagccacaggtaagggtattgggctaaatgaaaccaacacacacctgcaggcaaaactggtcgcacccctaggctttgataccaacggcaacattaagctaagcgttgcaggaggcatgaggctaaacaataacacactgatactagatgtaaactacccatttgaggctcaaggccaactgagcctaagagtgggctcgggcccactatatgtagattctagtagtcataacctaaccattagatgccttaggggattgtatataacatcttctaacaaccaaaacggtctagaagccaacattaaactaacaagaggccttgtgtatgacggaaatgccatagcagttaatgttggcaaagggctggaatacagccctactgacacaacagaaaaacctatacagactaaaataggtctaggcatggagtatgataccgagggagccatgatgacaaaactaggctctggactaagctttgacaattcaggagccattgtagtgggaaacaaaaatgatgacaggcttactttgtggaccacaccggacccatcgcccaactgtcagatctactctgaaaaagatgctaaactaaccttggtactgactaaatgtggcagtcaggttgtaggcacagtatctattgccgctcttaaaggtagcctcgtgccaatcactagtgcaatcagtgtggttcaggtatacctaaggtttgatgaaaatggggtactaatgagtaactcttcacttaatggcgaatactggaattttagaaacggagactcaactaatggcacaccatatacaaacgcagtgggtttcatgcctaatctactggcctatcctaaaggtcaaactacaactgcaaaaagtaacattgtcagccaggtctacatgaatggggacgatactaaacccatgacatttacaatcaacttcaatggccttagtgaaacaggggatacccctgttagtaaatattccatgacattctcatggaggtggccaaatggaagctacatagggcacaattttgtaacaaactcctttaccttctcctacatcgcccaagaataaagaaagcacagagatgcttgtttttgatttcaaaattgtgtgcttttatttattttcagcttacagtatttccagtagtcattcaaataaagcttaatcaaactgcatgagaacccttccacatagcttaaattagcaccagtgcaaatggagaaaaatcaacatacctttttttatccagatatcagagaactctagtggtcagttttcccccaccctcccagctcacagaatacacagtcctttccccccggctggctttaaacaacactatctcattggtaacagacatattcttaggtgtaataatccacacggtctcttggcgggccaaacgctggtcggtgatgttaataaactccccaggcagctctttcaagttcacgtcgctgtccaactgctgaagcgctcgcggctccgactgcgcctctagcggaggcaacggcaacacccgatccttgatctataaaggagtagagtcataatcccccataagaatagggcggtgatgcagcaacaaggcgcgcagcaactcctgccgccgcctctccgtacggcaggaatgcaacggcgtggtggtctcctccgtgataatccgcaccgctcgcagcatcagcatcctcgtcctccgggcacagcagcgcatcctgatctcactgagatcggcgcagtaagtgcagcacaaaaccaagatgttatttaagatcccacagtgcaaagcactgtacccaaagctcatggcgggaaggacagcccccacgtgaccatcataccagatcctcaggtaaatcaaatgacgacctctcataaacacgctggacatgtacatcacctccttgggcatgtgctgattcaccacctctcgataccacaagcatcgctgattaattaaagacccctcgagcaccatcctaaaccaggaagccagcacctgaccccccgccaggcactgcagggaccccggtgaatcgcagtggcagtgaagactccagcgctcgtagccgtgaaccatagagctggtcattatatccacattggcacaacacagacacactttcatacactttttcatgattagcagctcctctctagtcaggaccatatcccaaggaatcacccactcttgaatcaaggtaaatcccacacagcagggcaggcctctcacataactcacgttatgcatagtgagcgtgtcgcaatctggaaataccggatgatcttccatcaccgaagcccgggtctccgtctcaaagggaggtaaacggtccctcgtgtagggacagtggcgggataatcgagatcgtgttgaacgtagagtcatgccaaagggaacagcggacgtactcatatttcctccagcagaaccaagtgcgcgcgtggcagctatccctgcgtcttctgtctcgccgcctgccccgttcggtgtagtagttgtaatacagccactccctgagaccgtcaaggcgctccctggcgtccggatctatgacaacaccgtcctgcagcgccgccctgatgacatccaccaccgtagagtatgccaagcccagccaggaaatgcattcactttgacagcgagagataggaggagcggggagagatggaagaaccatgatagtaaagagaacttttattccaatcgatcttctaagatatcaaagtggagatctataagatgacactggtctcctccgctgagtcgatcaaaaataacagctaaaccacaaacaacacgattggtcaaatgctccacaagggcctgcagcataaaattgcctcggaactccaccgcaagcataacatcaaagccaccgcctctatcgtgatcaagaataaaaaccccacagctatccaccagacccatatagttttcatctctccatcgtgaaaaaagatttacaagctcctcctttaaatcacctccaaccaattgaaaaagttgaaccagaccgccctccaccttcattttcagcaagcgtatcatgattgcaaaaattcaggctcctcagacacctgtataagattgagaagcggaacgttaacatcgatgtttcgctcgcgtaaatcacgcctcagtgcaagcataatataatcccacaggtcggagcggatcagcgaggacacctccccgccaggaaccaactcaacggagcctatgctgattataatacgcatattcggagctatgctaaccagcacggcccccaaataggcgtactgcataggcggcgacaaaaagtgaacagtttgggttaaaaaatcaggcaaacactcgcgcaaaaaagcaagaacatcataaccatgctcatgcaaatagatgcaagtaagctcaggaacaaccacagaaaaatgcacaatttttctctcaaacatgactgcgagccctgcaaaaaataaaaaagaaacattacacaagagtagcctgtcttacgatgggatagactactctaaccaacataagacgggccacaacatcgcccgcgtggccataaaaaaaattgtccgtgtgattaaaaagaagcacagatagctggccagtcatatccggagtcatcacgtgtgaacccgtgtagacccccgggttggacacatcggccaaagaaagaaagcggccaatgtacccaggaggaattataacactaagacgaagatacaacagaataaccccatgagggggaataacaaagttagtaggtgaataaaaacgataaacacccgaaactccctcctgcgtaggcaaaatagcaccctccccttccaaaacaacatatagcgcttccacagcagccatgacaaaagactcaaaacactcaaaagactcagtcttaccaggaaaataaaagcactctcacagcaccagcactaatcagagtgtgaagagggccaagtgccgaacgagtatatataggaataaaaaatgacgtaaatgtgtaaaggtcagaaaacgcccagaaaaatacacagaccaacgcccgaaacgaaaacccgcgaaaaaatacccagaacttcctcaacaaccgccacttccgctttctcacggtacgtcacttccgcaagaaaagcaaaactacatttcccacatgtgtaaaaacgaaaccccgccccttgtaaccgcccacaacttacatcatcaaaacgtaaactcctacgtcacccgccccgcctctccccgcccacctcattatcatattggccacaatccaaaataaggtatattat

1. An adenovirus or adenoviral vector comprising (1) a nucleic acid sequence encoding one or more Plasmodium antigens and (2) one or more of the nucleic acid sequences selected from the group consisting of:
(a) the nucleic acid sequence of SEQ ID NO: 1,
(b) a nucleic acid sequence that is at least 98.5% identical to SEQ ID NO: 2,
(c) a nucleic acid sequence that is at least 90% identical to SEQ ID NO: 3,
(d) a nucleic acid sequence that is at least 80% identical to SEQ ID NO: 4, and
(e) a nucleic acid sequence that is at least 89% identical to SEQ ID NO: 5.

2. The adenovirus or adenoviral vector of claim 1, which comprises the nucleic acid sequence of SEQ ID NO: 1.

3. The adenovirus or adenoviral vector of claim 1, which comprises a nucleic acid sequence that is at least 98.5% identical to SEQ ID NO: 2.

4. The adenovirus or adenoviral vector of claim 3, which comprises the nucleic acid sequence of SEQ ID NO: 2.

5. The adenovirus or adenoviral vector of claim 1, which comprises a nucleic acid sequence that is at least 90% identical to SEQ ID NO: 3.

6. The adenovirus or adenoviral vector of claim 5, which comprises the nucleic acid sequence of SEQ ID NO: 3.

7. The adenovirus or adenoviral vector of claim 1, which comprises a nucleic acid sequence that is at least 80% identical to SEQ ID NO: 4.

8. The adenovirus or adenoviral vector of claim 7, which comprises the nucleic acid sequence of SEQ ID NO: 4.

9. The adenovirus or adenoviral vector of claim 1, which comprises a nucleic acid sequence that is at least 89% identical to SEQ ID NO: 5.

10. The adenovirus or adenoviral vector of claim 9, which comprises the nucleic acid sequence of SEQ ID NO: 5.

11. An adenovirus or adenoviral vector comprising (1) a nucleic acid sequence encoding one or more Plasmodium antigens and (2) one or more of the nucleic acid sequences selected from the group consisting of:
(a) a nucleic acid sequence that is at least 98.6% identical to SEQ ID NO: 6,
(b) a nucleic acid sequence that is at least 99.06% identical to SEQ ID NO: 7,
(c) a nucleic acid sequence that is at least 97.13% identical to SEQ ID NO: 8,
(d) a nucleic acid sequence that is at least 90.7% identical to SEQ ID NO: 9, and
(e) a nucleic acid sequence that is at least 96.6% identical to SEQ ID NO: 10.

12. The adenovirus or adenoviral vector of claim 11, which comprises a nucleic acid sequence that is at least 98.6% identical to SEQ ID NO: 6.

13. The adenovirus or adenoviral vector of claim 12, which comprises the nucleic acid sequence of SEQ ID NO: 6.

14. The adenovirus or adenoviral vector of claim 11, which comprises a nucleic acid sequence that is at least 99.06% identical to SEQ ID NO: 7.

15. The adenovirus or adenoviral vector of claim 14, which comprises the nucleic acid sequence of SEQ ID NO: 7.

16. The adenovirus or adenoviral vector of claim 11, which comprises a nucleic acid sequence that is at least 97.13% identical to SEQ ID NO: 8.

17. The adenovirus or adenoviral vector of claim 16, which comprises the nucleic acid sequence of SEQ ID NO: 8.

18. The adenovirus or adenoviral vector of claim 11, which comprises a nucleic acid sequence that is at least 90.7% identical to SEQ ID NO: 9.

19. The adenovirus or adenoviral vector of claim 18, which comprises the nucleic acid sequence of SEQ ID NO: 9.

20. The adenovirus or adenoviral vector of claim 1, which comprises a nucleic acid sequence that is at least 96.6% identical to SEQ ID NO: 10.

21. The adenovirus or adenoviral vector of claim 20, which comprises the nucleic acid sequence of SEQ ID NO: 10.

22. An adenovirus or adenoviral vector comprising (1) a nucleic acid sequence encoding one or more Plasmodium antigens and (2) one or more of the nucleic acid sequences selected from the group consisting of:
(a) a nucleic acid sequence comprising at least 121 contiguous nucleotides of SEQ ID NO: 6,
(b) a nucleic acid sequence comprising at least 462 contiguous nucleotides of SEQ ID NO: 7,
(c) a nucleic acid sequence comprising at least 234 contiguous nucleotides of SEQ ID NO: 8,
(d) a nucleic acid sequence comprising at least 606 contiguous nucleotides of SEQ ID NO: 9, and
(e) a nucleic acid sequence comprising at least 188 contiguous nucleotides of SEQ ID NO: 10.

23. The adenovirus or adenoviral vector of claim 22, which comprises a nucleic acid sequence comprising at least 121 contiguous nucleotides of SEQ ID NO: 6.

24. The adenovirus or adenoviral vector of claim 23, which comprises the nucleic acid sequence of SEQ ID NO: 6.

25. The adenovirus or adenoviral vector of claim 22, which comprises a nucleic acid sequence comprising at least 462 contiguous nucleotides of SEQ ID NO: 7

26. The adenovirus or adenoviral vector of claim 25, which comprises the nucleic acid sequence of SEQ ID NO: 7.

27. The adenovirus or adenoviral vector of claim 22, which comprises a nucleic acid sequence comprising at least 234 contiguous nucleotides of SEQ ID NO: 8.

28. The adenovirus or adenoviral vector of claim 27, which comprises the nucleic acid sequence of SEQ ID NO: 8.

29. The adenovirus or adenoviral vector of claim 22, which comprises a nucleic acid sequence comprising at least 606 contiguous nucleotides of SEQ ID NO: 9.

30. The adenovirus or adenoviral vector of claim 29, which comprises the nucleic acid sequence of SEQ ID NO: 9.

31. The adenovirus or adenoviral vector of claim 22, which comprises a nucleic acid sequence comprising at least 188 contiguous nucleotides of SEQ ID NO: 10.

32. The adenovirus or adenoviral vector of claim 31, which comprises the nucleic acid sequence of SEQ ID NO: 10.

33. An adenovirus or adenoviral vector comprising (1) a nucleic acid sequence encoding one or more Plasmodium antigens and (2) one or more of the amino acid sequences selected from the group consisting of:
(a) the amino acid sequence of SEQ ID NO: 11,
(b) an amino acid sequence that is at least 82% identical to SEQ ID NO: 13,
(c) an amino acid sequence that is at least 80% identical to SEQ ID NO: 14, and
(d) an amino acid sequence that is at least 83% identical to SEQ ID NO: 15.

34. The adenovirus or adenoviral vector of claim 33, which comprises the amino acid sequence of SEQ ID NO: 11.

35. The adenovirus or adenoviral vector of claim 33, which comprises an amino acid sequence that is at least 82% identical to SEQ ID NO: 13.

36. The adenovirus or adenoviral vector of claim 35, which comprises the amino acid sequence of SEQ ID NO: 13.

37. The adenovirus or adenoviral vector of claim 33, which comprises an amino acid sequence that is at least 80% identical to SEQ ID NO: 14.

38. The adenovirus or adenoviral vector of claim 37, which comprises the amino acid sequence of SEQ ID NO: 14.

39. The adenovirus or adenoviral vector of claim 33, which comprises an amino acid sequence that is at least 83% identical to SEQ ID NO: 15.

40. The adenovirus or adenoviral vector of claim 39, which comprises the amino acid sequence of SEQ ID NO: 15.

41. An adenovirus or adenoviral vector comprising (1) a nucleic acid sequence encoding one or more Plasmodium antigens and (2) one or more of the nucleic acid sequences selected from the group consisting of:
(a) a nucleic acid sequence encoding the amino acid sequence of SEQ ID NO: 11,
(b) a nucleic acid sequence encoding an amino acid sequence that is at least 99% identical to SEQ ID NO: 12,
(c) a nucleic acid sequence encoding an amino acid sequence that is at least 82% identical to SEQ ID NO: 13,
(d) a nucleic acid sequence encoding an amino acid sequence that is at least 80% identical to SEQ ID NO: 14, and
(e) a nucleic acid sequence encoding an amino acid sequence that is at least 83% identical to SEQ ID NO: 15.

42. The adenovirus or adenoviral vector of claim 41, which comprises a nucleic acid sequence encoding the amino acid sequence of SEQ ID NO: 11.

43. The adenovirus or adenoviral vector of claim 41, which comprises a nucleic acid sequence encoding an amino acid sequence that is at least 99% identical to SEQ ID NO: 12.

44. The adenovirus or adenoviral vector of claim 43, which comprises a nucleic acid sequence encoding the amino acid sequence of SEQ ID NO: 12.

45. The adenovirus or adenoviral vector of claim 41, which comprises a nucleic acid sequence encoding an amino acid sequence that is at least 82% identical to SEQ ID NO: 13.

46. The adenovirus or adenoviral vector of claim 45, which comprises a nucleic acid sequence encoding the amino acid sequence of SEQ ID NO: 13.

47. The adenovirus or adenoviral vector of claim 41, which comprises a nucleic acid sequence encoding an amino acid sequence that is at least 80% identical to SEQ ID NO: 14.

48. The adenovirus or adenoviral vector of claim 47, which comprises a nucleic acid sequence encoding the amino acid sequence of SEQ ID NO: 14.

49. The adenovirus or adenoviral vector of claim 41, which comprises a nucleic acid sequence encoding an amino acid sequence that is at least 83% identical to SEQ ID NO: 15.

50. The adenovirus or adenoviral vector of claim 49, which comprises a nucleic acid sequence encoding the amino acid sequence of SEQ ID NO: 15.

51. An adenovirus or adenoviral vector comprising (1) a nucleic acid sequence encoding one or more Plasmodium antigens and (2) one or more of the amino acid sequences selected from the group consisting of:
(a) the amino acid sequence of SEQ ID NO: 16,
(b) an amino acid sequence that is at least 97.8% identical to SEQ ID NO: 18,
(c) an amino acid that is at least 93.4% identical to SEQ ID NO: 19, and
(d) an amino acid sequence that is at least 98.2% identical to SEQ ID NO: 20.

52. The adenovirus or adenoviral vector of claim 51, which comprises the amino acid sequence of SEQ ID NO: 16.

53. The adenovirus or adenoviral vector of claim 51, which comprises an amino acid sequence that is at least 97.8% identical to SEQ ID NO: 18.

54. The adenovirus or adenoviral vector of claim 53, which comprises the amino acid sequence of SEQ ID NO: 18.

55. The adenovirus or adenoviral vector of claim 51, which comprises an amino acid sequence that is at least 93.4% identical to SEQ ID NO: 19.

56. The adenovirus or adenoviral vector of claim 55, which comprises the amino acid sequence of SEQ ID NO: 19.

57. The adenovirus or adenoviral vector of claim 51, which comprises an amino acid sequence that is at least 98.2% identical to SEQ ID NO: 20.

58. The adenovirus or adenoviral vector of claim 57, which comprises the amino acid sequence of SEQ ID NO: 20.

59. An adenovirus or adenoviral vector comprising (1) a nucleic acid sequence encoding one or more Plasmodium antigens and (2) one or more of the nucleic acid sequences selected from the group consisting of:
(a) a nucleic acid sequence encoding the amino acid sequence of SEQ ID NO: 16,
(b) a nucleic acid sequence encoding an amino acid sequence that is at least 99.78% identical to SEQ ID NO: 17,
(c) a nucleic acid sequence encoding an amino acid sequence that is at least 97.8% identical to SEQ ID NO: 18,
(d) a nucleic acid sequence encoding an amino acid that is at least 93.4% identical to SEQ ID NO: 19, and
(e) a nucleic acid sequence encoding an amino acid sequence that is at least 98.2% identical to SEQ ID NO: 20.

60. The adenovirus or adenoviral vector of claim 59, which comprises a nucleic acid sequence encoding the amino acid sequence of SEQ ID NO: 16.

61. The adenovirus or adenoviral vector of claim 59, which comprises a nucleic acid sequence encoding an amino acid sequence that is at least 99.78% identical to SEQ ID NO: 17.

62. The adenovirus or adenoviral vector of claim 61, which comprises a nucleic acid sequence encoding the amino acid sequence of SEQ ID NO: 17.

63. The adenovirus or adenoviral vector of claim 59, which comprises a nucleic acid sequence encoding an amino acid sequence that is at least 97.8% identical to SEQ ID NO: 18.

64. The adenovirus or adenoviral vector of claim 63, which comprises a nucleic acid sequence encoding the amino acid sequence of SEQ ID NO: 18.

65. The adenovirus or adenoviral vector of claim 59, which comprises a nucleic acid sequence encoding an amino acid sequence that is at least 93.4% identical to SEQ ID NO: 19.

66. The adenovirus or adenoviral vector of claim 65, which comprises a nucleic acid sequence encoding the amino acid sequence of SEQ ID NO: 19.

67. The adenovirus or adenoviral vector of claim 59, which comprises an amino acid sequence that is at least 98.2% identical to SEQ ID NO: 20.

68. The adenovirus or adenoviral vector of claim 67, which comprises the amino acid sequence of SEQ ID NO: 20.

69. An adenovirus or adenoviral vector comprising (1) a nucleic acid sequence encoding one or more Plasmodium antigens and (2) one or more of the amino acid sequences selected from the group consisting of:
(a) an amino acid sequence comprising at least 89 contiguous amino acid residues of SEQ ID NO: 16,
(b) an amino acid sequence comprising at least 247 contiguous amino acid residues of SEQ ID NO: 18,
(c) an amino acid sequence comprising at least 370 contiguous amino acid residues of SEQ ID NO: 19, and
(d) an amino acid sequence comprising at least 192 contiguous amino acid residues of SEQ ID NO: 20.

70. The adenovirus or adenoviral vector of claim 69, which comprises an amino acid sequence comprising at least 89 contiguous amino acid residues of SEQ ID NO: 16.

71. The adenovirus or adenoviral vector of claim 70, which comprises the amino acid sequence of SEQ ID NO: 16.

72. The adenovirus or adenoviral vector of claim 69, which comprises an amino acid sequence comprising at least 247 contiguous amino acid residues of SEQ ID NO: 18.

73. The adenovirus or adenoviral vector of claim 72, which comprises the amino acid sequence of SEQ ID NO: 18.

74. The adenovirus or adenoviral vector of claim 69, which comprises an amino acid sequence comprising at least 370 contiguous amino acid residues of SEQ ID NO: 19.

75. The adenovirus or adenoviral vector of claim 74, which comprises the amino acid sequence of SEQ ID NO: 19.

76. The adenovirus or adenoviral vector of claim 69, which comprises an amino acid sequence comprising at least 192 contiguous amino acid residues of SEQ ID NO: 20.

77. The adenovirus or adenoviral vector of claim 76, which comprises the amino acid sequence of SEQ ID NO: 20.

78. An adenovirus or adenoviral vector comprising (1) a nucleic acid sequence encoding one or more Plasmodium antigens and (2) one or more of the nucleic acid sequences selected from the group consisting of:
(a) a nucleic acid sequence encoding an amino acid sequence comprising at least 89 contiguous amino acid residues of SEQ ID NO: 16,
(b) a nucleic acid sequence encoding an amino acid sequence comprising at least 428 contiguous amino acid residues of SEQ ID NO: 17,
(c) a nucleic acid sequence encoding an amino acid sequence comprising at least 247 contiguous amino acid residues of SEQ ID NO: 18,
(d) a nucleic acid sequence encoding an amino acid sequence comprising at least 370 contiguous amino acid residues of SEQ ID NO: 19, and
(e) a nucleic acid sequence encoding an amino acid sequence comprising at least 192 contiguous amino acid residues of SEQ ID NO: 20.

79. The adenovirus or adenoviral vector of claim 78, which comprises a nucleic acid sequence encoding an amino acid sequence comprising at least 89 contiguous amino acid residues of SEQ ID NO: 16.

80. The adenovirus or adenoviral vector of claim 79, which comprises a nucleic acid sequence encoding the amino acid sequence of SEQ ID NO: 16.

81. The adenovirus or adenoviral vector of claim 78, which comprises a nucleic acid sequence encoding an amino acid sequence comprising at least 428 contiguous amino acid residues of SEQ ID NO: 17.

82. The adenovirus or adenoviral vector of claim 81, which comprises a nucleic acid sequence encoding the amino acid sequence of SEQ ID NO: 17.

83. The adenovirus or adenoviral vector of claim 78, which comprises a nucleic acid sequence encoding an amino acid sequence comprising at least 247 contiguous amino acid residues of SEQ ID NO: 18.

84. The adenovirus or adenoviral vector of claim 83, which comprises a nucleic acid sequence encoding the amino acid sequence of SEQ ID NO: 18.

85. The adenovirus or adenoviral vector of claim 78, which comprises a nucleic acid sequence encoding an amino acid sequence comprising at least 370 contiguous amino acid residues of SEQ ID NO: 19.

86. The adenovirus or adenoviral vector of claim 85, which comprises a nucleic acid sequence encoding the amino acid sequence of SEQ ID NO: 19.

87. The adenovirus or adenoviral vector of claim 78, which comprises a nucleic acid sequence encoding an amino acid sequence comprising at least 192 contiguous amino acid residues of SEQ ID NO: 20.

88. The adenovirus or adenoviral vector of claim 87, which comprises a nucleic acid sequence encoding the amino acid sequence of SEQ ID NO: 20.

89. An adenovirus or adenoviral vector comprising (1) a nucleic acid sequence encoding one or more Plasmodium antigens and (2) one or more of the nucleic acid sequences selected from the group consisting of:
(a) a nucleic acid sequence that is at least 96% identical to SEQ ID NO: 25,
(b) a nucleic acid sequence that is at least 99% identical to SEQ ID NO: 26,
(c) a nucleic acid sequence that is at least 80% identical to SEQ ID NO: 27,
(d) a nucleic acid sequence that is at least 80% identical to SEQ ID NO: 28, and
(e) a nucleic acid sequence that is at least 85.4% identical to SEQ ID NO: 29.

90. The adenovirus or adenoviral vector of claim 89, which comprises a nucleic acid sequence that is at least 96% identical to SEQ ID NO: 25.

91. The adenovirus or adenoviral vector of claim 90, which comprises the nucleic acid sequence of SEQ ID NO: 25.

92. The adenovirus or adenoviral vector of claim 89, which comprises a nucleic acid sequence that is at least 99% identical to SEQ ID NO: 26.

93. The adenovirus or adenoviral vector of claim 89, which comprises a nucleic acid sequence that is at least 85.4% identical to SEQ ID NO: 29.

99. The adenovirus or adenoviral vector of claim 98, which comprises the nucleic acid sequence of SEQ ID NO: 29.

100. An adenovirus or adenoviral vector comprising (1) a nucleic acid sequence encoding one or more Plasmodium antigens and (2) one or more of the nucleic acid sequences selected from the group consisting of:
(a) a nucleic acid sequence that is at least 98.7% identical to SEQ ID NO: 30,
(b) a nucleic acid sequence that is at least 98.9% identical to SEQ ID NO: 31,
(c) a nucleic acid sequence that is at least 99.4% identical to SEQ ID NO: 32,
(d) a nucleic acid sequence that is at least 99.1% identical to SEQ ID NO: 33,
(e) a nucleic acid sequence that is at least 81.25% identical to SEQ ID NO: 34,
(f) a nucleic acid sequence that is at least 90.83% identical to SEQ ID NO: 35, and
(g) a nucleic acid sequence that is at least 82.5% identical to SEQ ID NO: 36.

101. The adenovirus or adenoviral vector of claim 100, which comprises a nucleic acid sequence that is at least 98.7% identical to SEQ ID NO: 30.

102. The adenovirus or adenoviral vector of claim 101, which comprises the nucleic acid sequence of SEQ ID NO: 30.

103. The adenovirus or adenoviral vector of claim 100, which comprises a nucleic acid sequence that is at least 98.9% identical to SEQ ID NO: 31.

104. The adenovirus or adenoviral vector of claim 103, which comprises the nucleic acid sequence of SEQ ID NO: 31.

105. The adenovirus or adenoviral vector of claim 100, which comprises a nucleic acid sequence that is at least 99.4% identical to SEQ ID NO: 32.

106. The adenovirus or adenoviral vector of claim 105, which comprises the nucleic acid sequence of SEQ ID NO: 32.

107. The adenovirus or adenoviral vector of claim 100, which comprises a nucleic acid sequence that is at least 99.1% identical to SEQ ID NO: 33.

108. The adenovirus or adenoviral vector of claim 107, which comprises the nucleic acid sequence of SEQ ID NO: 33.

109. The adenovirus or adenoviral vector of claim 100, which comprises a nucleic acid sequence that is at least 81.25% identical to SEQ ID NO: 34.

110. The adenovirus or adenoviral vector of claim 109, which comprises the nucleic acid sequence of SEQ ID NO: 34.

111. The adenovirus or adenoviral vector of claim 100, which comprises a nucleic acid sequence that is at least 90.83% identical to SEQ ID NO: 35.

112. The adenovirus or adenoviral vector of claim 111, which comprises the nucleic acid sequence of SEQ ID NO: 35.

113. The adenovirus or adenoviral vector of claim 100, which comprises a nucleic acid sequence that is at least 82.5% identical to SEQ ID NO: 36.

114. The adenovirus or adenoviral vector of claim 113, which comprises the nucleic acid sequence of SEQ ID NO: 36.

115. An adenovirus or adenoviral vector comprising (1) a nucleic acid sequence encoding one or more Plasmodium antigens and (2) one or more of the nucleic acid sequences selected from the group consisting of:
(a) a nucleic acid sequence comprising at least 162 contiguous nucleotides of SEQ ID NO: 30,
(b) a nucleic acid sequence comprising at least 162 contiguous nucleotides of SEQ ID NO: 31,
(c) a nucleic acid sequence comprising at least 121 contiguous nucleotides of SEQ ID NO: 32,
(d) a nucleic acid sequence comprising at least 531 contiguous nucleotides of SEQ ID NO: 33,
(e) a nucleic acid sequence comprising at least 156 contiguous nucleotides of SEQ ID NO: 34,
(f) a nucleic acid sequence comprising at least 192 contiguous nucleotides of SEQ ID NO: 35, and
(g) a nucleic acid sequence comprising at least 84 contiguous nucleotides of SEQ ID NO: 36.

116. The adenovirus or adenoviral vector of claim 115, which comprises a nucleic acid sequence comprising at least 162 contiguous nucleotides of SEQ ID NO: 30.

117. The adenovirus or adenoviral vector of claim 116, which comprises the nucleic acid sequence of SEQ ID NO: 30.

118. The adenovirus or adenoviral vector of claim 115, which comprises a nucleic acid sequence comprising at least 162 contiguous nucleotides of SEQ ID NO: 31.

119. The adenovirus or adenoviral vector of claim 118, which comprises the nucleic acid sequence of SEQ ID NO: 31.

120. The adenovirus or adenoviral vector of claim 115, which comprises a nucleic acid sequence comprising at least 121 contiguous nucleotides of SEQ ID NO: 32.

121. The adenovirus or adenoviral vector of claim 120, which comprises the nucleic acid sequence of SEQ ID NO: 32.

122. The adenovirus or adenoviral vector of claim 115, which comprises a nucleic acid sequence comprising at least 531 contiguous nucleotides of SEQ ID NO: 33.

123. The adenovirus or adenoviral vector of claim 122, which comprises the nucleic acid sequence of SEQ ID NO: 33.

124. The adenovirus or adenoviral vector of claim 115, which comprises a nucleic acid sequence comprising at least 156 contiguous nucleotides of SEQ ID NO: 34.

125. The adenovirus or adenoviral vector of claim 124, which comprises the nucleic acid sequence of SEQ ID NO: 34.

126. The adenovirus or adenoviral vector of claim 115, which comprises a nucleic acid sequence comprising at least 192 contiguous nucleotides of SEQ ID NO: 35.

127. The adenovirus or adenoviral vector of claim 126, which comprises the nucleic acid sequence of SEQ ID NO: 35.

128. The adenovirus or adenoviral vector of claim 115, which comprises a nucleic acid sequence comprising at least 84 contiguous nucleotides of SEQ ID NO: 36.

129. The adenovirus or adenoviral vector of claim 128, which comprises the nucleic acid sequence of SEQ ID NO: 36.

130. An adenovirus or adenoviral vector comprising (1) a nucleic acid sequence encoding one or more Plasmodium antigens and (2) one or more of the amino acid sequences selected from the group consisting of:
(a) an amino acid sequence that is at least 85% identical to SEQ ID NO: 38,
(b) an amino acid sequence that is at least 80% identical to SEQ ID NO: 39, and
(c) an amino acid sequence that is at least 80% identical to SEQ ID NO: 40.

131. The adenovirus or adenoviral vector of claim 130, which comprises an amino acid sequence that is at least 85% identical to SEQ ID NO: 38.

132. The adenovirus or adenoviral vector of claim 131, which comprises the amino acid sequence of SEQ ID NO: 38.

133. The adenovirus or adenoviral vector of claim 130, which comprises an amino acid sequence that is at least 80% identical to SEQ ID NO: 39.

134. The adenovirus or adenoviral vector of claim 133, which comprises the amino acid sequence of SEQ ID NO: 39.

135. The adenovirus or adenoviral vector of claim 130, which comprises an amino acid sequence that is at least 80% identical to SEQ ID NO: 40.

136. The adenovirus or adenoviral vector of claim 135, which comprises the amino acid sequence of SEQ ID NO: 40.

137. An adenovirus or adenoviral vector comprising (1) a nucleic acid sequence encoding one or more Plasmodium antigens and (2) one or more of the nucleic acid sequences selected from the group consisting of:
(a) a nucleic acid sequence encoding an amino acid sequence that is at least 99.7% identical to SEQ ID NO: 37,
(b) a nucleic acid sequence encoding an amino acid sequence that is at least 85% identical to SEQ ID NO: 38,
(c) a nucleic acid sequence encoding an amino acid sequence that is at least 80% identical to SEQ ID NO: 39, and
(d) a nucleic acid sequence encoding an amino acid sequence that is at least 80% identical to SEQ ID NO: 40.

138. The adenovirus or adenoviral vector of claim 137, which comprises a nucleic acid sequence encoding an amino acid sequence that is at least 99.7% identical to SEQ ID NO: 37.

139. The adenovirus or adenoviral vector of claim 138, which comprises a nucleic acid sequence encoding the amino acid sequence of SEQ ID NO: 37.

140. The adenovirus or adenoviral vector of claim 137, which comprises a nucleic acid sequence encoding an amino acid sequence that is at least 85% identical to SEQ ID NO: 38.

141. The adenovirus or adenoviral vector of claim 140, which comprises a nucleic acid sequence encoding the amino acid sequence of SEQ ID NO: 38.

142. The adenovirus or adenoviral vector of claim 137, which comprises a nucleic acid sequence encoding an amino acid sequence that is at least 80% identical to SEQ ID NO: 39.

143. The adenovirus or adenoviral vector of claim 142, which comprises a nucleic acid sequence encoding the amino acid sequence of SEQ ID NO: 39.

144. The adenovirus or adenoviral vector of claim 137, which comprises a nucleic acid sequence encoding an amino acid sequence that is at least 80% identical to SEQ ID NO: 40.

145. The adenovirus or adenoviral vector of claim 144, which comprises a nucleic acid sequence encoding the amino acid sequence of SEQ ID NO: 40.

146. An adenovirus or adenoviral vector comprising (1) a nucleic acid sequence encoding one or more Plasmodium antigens and (2) one or more of the amino acid sequences selected from the group consisting of:
(a) an amino acid sequence that is at least 99% identical to SEQ ID NO: 42,
(b) an amino acid sequence that is at least 81.4% identical to SEQ ID NO: 44,
(c) an amino acid sequence that is at least 91.3% identical to SEQ ID NO: 45, and
(d) an amino acid sequence that is at least 83.4% identical to SEQ ID NO: 46.

147. The adenovirus or adenoviral vector of claim 146, which comprises an amino acid sequence that is at least 99% identical to SEQ ID NO: 42.

148. The adenovirus or adenoviral vector of claim 147, which comprises the amino acid sequence of SEQ ID NO: 42.

149. The adenovirus or adenoviral vector of claim 146, which comprises an amino acid sequence that is at least 81.4% identical to SEQ ID NO: 44.

150. The adenovirus or adenoviral vector of claim 149, which comprises the amino acid sequence of SEQ ID NO: 44.

151. The adenovirus or adenoviral vector of claim 146, which comprises an amino acid sequence that is at least 91.3% identical to SEQ ID NO: 45.

152. The adenovirus or adenoviral vector of claim 151, which comprises the amino acid sequence of SEQ ID NO: 45.

153. The adenovirus or adenoviral vector of claim 146, which comprises an amino acid sequence that is at least 83.4% identical to SEQ ID NO: 46.

154. The adenovirus or adenoviral vector of claim 153, which comprises the amino acid sequence of SEQ ID NO: 46.

155. An adenovirus or adenoviral vector comprising (1) a nucleic acid sequence encoding one or more Plasmodium antigens and (2) one or more of the nucleic acid sequences selected from the group consisting of:
(a) a nucleic acid sequence encoding an amino acid sequence that is at least 99% identical to SEQ ID NO: 42,
(b) a nucleic acid sequence encoding an amino acid sequence that is at least 99.75% identical to SEQ ID NO: 43,
(c) a nucleic acid sequence encoding an amino acid sequence that is at least 81.4% identical to SEQ ID NO: 44,
(d) a nucleic acid sequence encoding an amino acid sequence that is at least 91.3% identical to SEQ ID NO: 45,
(e) a nucleic acid sequence encoding an amino acid sequence that is at least 83.4% identical to SEQ ID NO: 46.

156. The adenovirus or adenoviral vector of claim 155, which comprises a nucleic acid sequence encoding an amino acid sequence that is at least 99% identical to SEQ ID NO: 42.

157. The adenovirus or adenoviral vector of claim 156, which comprises a nucleic acid sequence encoding the amino acid sequence of SEQ ID NO: 42.

158. The adenovirus or adenoviral vector of claim 155, which comprises a nucleic acid sequence encoding an amino acid sequence that is at least 99.75% identical to SEQ ID NO: 43.

159. The adenovirus or adenoviral vector of claim 158, which comprises a nucleic acid sequence encoding the amino acid sequence of SEQ ID NO: 43.

160. The adenovirus or adenoviral vector of claim 155, which comprises a nucleic acid sequence encoding an amino acid sequence that is at least 81.4% identical to SEQ ID NO: 44.

161. The adenovirus or adenoviral vector of claim 160, which comprises a nucleic acid sequence encoding the amino acid sequence of SEQ ID NO: 44.

162. The adenovirus or adenoviral vector of claim 155, which comprises a nucleic acid sequence encoding an amino acid sequence that is at least 91.3% identical to SEQ ID NO: 45.

163. The adenovirus or adenoviral vector of claim 162, which comprises a nucleic acid sequence encoding the amino acid sequence of SEQ ID NO: 45.

164. The adenovirus or adenoviral vector of claim 155, which comprises a nucleic acid sequence encoding an amino acid sequence that is at least 83.4% identical to SEQ ID NO: 46.

165. The adenovirus or adenoviral vector of claim 164, which comprises a nucleic acid sequence encoding the amino acid sequence of SEQ ID NO: 46.

166. An adenovirus or adenoviral vector comprising (1) a nucleic acid sequence encoding one or more Plasmodium antigens and (2) one or more of the amino acid sequences selected from the group consisting of:
(a) an amino acid sequence comprising at least 89 contiguous amino acid residues of SEQ ID NO: 42,
(b) an amino acid sequence comprising at least 114 contiguous amino acid residues of SEQ ID NO: 44,
(c) an amino acid sequence comprising at least 231 contiguous amino acid residues of SEQ ID NO: 45, and
(d) an amino acid sequence comprising at least 30 contiguous amino acid residues of SEQ ID NO: 46.

167. The adenovirus or adenoviral vector of claim 166, which comprises an amino acid sequence comprising at least 89 contiguous amino acid residues of SEQ ID NO: 42.

168. The adenovirus or adenoviral vector of claim 167, which comprises the amino acid sequence of SEQ ID NO: 42.

169. The adenovirus or adenoviral vector of claim 166, which comprises an amino acid sequence comprising at least 114 contiguous amino acid residues of SEQ ID NO: 44.

170. The adenovirus or adenoviral vector of claim 169, which comprises the amino acid sequence of SEQ ID NO: 44.

171. The adenovirus or adenoviral vector of claim 166, which comprises an amino acid sequence comprising at least 231 contiguous amino acid residues of SEQ ID NO: 45.

172. The adenovirus or adenoviral vector of claim 171, which comprises the amino acid sequence of SEQ ID NO: 45.

173. The adenovirus or adenoviral vector of claim 166, which comprises an amino acid sequence comprising at least 30 contiguous amino acid residues of SEQ ID NO: 46.

174. The adenovirus or adenoviral vector of claim 173, which comprises the amino acid sequence of SEQ ID NO: 46.

175. An adenovirus or adenoviral vector comprising (1) a nucleic acid sequence encoding one or more Plasmodium antigens and (2) one or more of the nucleic acid sequences selected from the group consisting of:
(a) a nucleic acid sequence encoding an amino acid sequence comprising at least 89 contiguous amino acid residues of SEQ ID NO: 42,
(b) a nucleic acid sequence encoding an amino acid sequence comprising at least 428 contiguous amino acid residues of SEQ ID NO: 43,
(c) a nucleic acid sequence encoding an amino acid sequence comprising at least 114 contiguous amino acid residues of SEQ ID NO: 44,
(d) a nucleic acid sequence encoding an amino acid sequence comprising at least 231 contiguous amino acid residues of SEQ ID NO: 45, and
(e) a nucleic acid sequence encoding an amino acid sequence comprising at least 30 contiguous amino acid residues of SEQ ID NO: 46.

176. The adenovirus or adenoviral vector of claim 175, which comprises a nucleic acid sequence encoding an amino acid sequence comprising at least 89 contiguous amino acid residues of SEQ ID NO: 42.

177. The adenovirus or adenoviral vector of claim 176, which comprises a nucleic acid sequence encoding the amino acid sequence of SEQ ID NO: 42.

178. The adenovirus or adenoviral vector of claim 175, which comprises a nucleic acid sequence encoding an amino acid sequence comprising at least 428 contiguous amino acid residues of SEQ ID NO: 43

179. The adenovirus or adenoviral vector of claim 178, which comprises a nucleic acid sequence encoding the amino acid sequence of SEQ ID NO: 43.

180. The adenovirus or adenoviral vector of claim 175, which comprises a nucleic acid sequence encoding an amino acid sequence comprising at least 114 contiguous amino acid residues of SEQ ID NO: 44.

181. The adenovirus or adenoviral vector of claim 180, which comprises a nucleic acid sequence encoding the amino acid sequence of SEQ ID NO: 44.

182. The adenovirus or adenoviral vector of claim 175, which comprises a nucleic acid sequence encoding an amino acid sequence comprising at least 231 contiguous amino acid residues of SEQ ID NO: 45.

183. The adenovirus or adenoviral vector of claim 182, which comprises a nucleic acid sequence encoding the amino acid sequence of SEQ ID NO: 45.

184. The adenovirus or adenoviral vector of claim 175, which comprises a nucleic acid sequence encoding an amino acid sequence comprising at least 30 contiguous amino acid residues of SEQ ID NO: 46.

185. The adenovirus or adenoviral vector of claim 184, which comprises a nucleic acid sequence encoding the amino acid sequence of SEQ ID NO: 46.

186. An adenovirus or adenoviral vector comprising (1) a nucleic acid sequence encoding one or more Plasmodium antigens and (2) one or more of the nucleic acid sequences selected from the group consisting of:
(a) a nucleic acid sequence that is at least 97% identical to SEQ ID NO: 59,
(b) a nucleic acid sequence that is at least 97.5% identical to SEQ ID NO: 60,
(c) a nucleic acid sequence that is at least 80% identical to SEQ ID NO: 61,
(d) a nucleic acid sequence that is at least 96% identical to SEQ ID NO: 62, and
(e) a nucleic acid sequence that is at least 96% identical to SEQ ID NO: 63.

187. The adenovirus or adenoviral vector of claim 186, which comprises a nucleic acid sequence that is at least 97% identical to SEQ ID NO: 59.

188. The adenovirus or adenoviral vector of claim 187, which comprises the nucleic acid sequence of SEQ ID NO: 59.

189. The adenovirus or adenoviral vector of claim 186, which comprises a nucleic acid sequence that is at least 97.5% identical to SEQ ID NO: 60.

190. The adenovirus or adenoviral vector of claim 189, which comprises the nucleic acid sequence of SEQ ID NO: 60.

191. The adenovirus or adenoviral vector of claim 186, which comprises a nucleic acid sequence that is at least 80% identical to SEQ ID NO: 61.

192. The adenovirus or adenoviral vector of claim 191, which comprises the nucleic acid sequence of SEQ ID NO: 61.

193. The adenovirus or adenoviral vector of claim 186, which comprises a nucleic acid sequence that is at least 96% identical to SEQ ID NO: 62.

194. The adenovirus or adenoviral vector of claim 193, which comprises the nucleic acid sequence of SEQ ID NO: 62.

195. The adenovirus or adenoviral vector of claim 186, which comprises a nucleic acid sequence that is at least 96% identical to SEQ ID NO: 63.

196. The adenovirus or adenoviral vector of claim 195, which comprises the nucleic acid sequence of SEQ ID NO: 63.

197. An adenovirus or adenoviral vector comprising (1) a nucleic acid sequence encoding one or more Plasmodium antigens and (2) one or more of the nucleic acid sequences selected from the group consisting of:
(a) a nucleic acid sequence that is at least 98.4% identical to SEQ ID NO: 64,
(b) a nucleic acid sequence that is at least 99.01% identical to SEQ ID NO: 65,
(c) a nucleic acid sequence that is at least 97.08% identical to SEQ ID NO: 66,
(d) a nucleic acid sequence that is at least 96.52% identical to SEQ ID NO: 67, and
(e) a nucleic acid sequence that is at least 98.49% identical to SEQ ID NO: 68.

198. The adenovirus or adenoviral vector of claim 197, which comprises a nucleic acid sequence that is at least 98.4% identical to SEQ ID NO: 64.

199. The adenovirus or adenoviral vector of claim 198, which comprises the nucleic acid sequence of SEQ ID NO: 64.

200. The adenovirus or adenoviral vector of claim 197, which comprises a nucleic acid sequence that is at least 99.01% identical to SEQ ID NO: 65.

201. The adenovirus or adenoviral vector of claim 200, which comprises the nucleic acid sequence of SEQ ID NO: 65.

202. The adenovirus or adenoviral vector of claim 197, which comprises a nucleic acid sequence that is at least 97.08% identical to SEQ ID NO: 66.

203. The adenovirus or adenoviral vector of claim 202, which comprises the nucleic acid sequence of SEQ ID NO: 66.

204. The adenovirus or adenoviral vector of claim 197, which comprises a nucleic acid sequence that is at least 96.52% identical to SEQ ID NO: 67.

205. The adenovirus or adenoviral vector of claim 204, which comprises the nucleic acid sequence of SEQ ID NO: 67.

206. The adenovirus or adenoviral vector of claim 197, which comprises a nucleic acid sequence that is at least 98.49% identical to SEQ ID NO: 68.

207. The adenovirus or adenoviral vector of claim 206, which comprises the nucleic acid sequence of SEQ ID NO: 68.

208. An adenovirus or adenoviral vector comprising (1) a nucleic acid sequence encoding one or more Plasmodium antigens and (2) one or more of the nucleic acid sequences selected from the group consisting of:
(a) a nucleic acid sequence comprising at least 121 contiguous nucleotides of SEQ ID NO: 64,
(b) a nucleic acid sequence comprising at least 462 contiguous nucleotides of SEQ ID NO: 65,
(c) a nucleic acid sequence comprising at least 234 contiguous nucleotides of SEQ ID NO: 66,
(d) a nucleic acid sequence comprising at least 606 contiguous nucleotides of SEQ ID NO: 67, and
(e) a nucleic acid sequence comprising at least 188 contiguous nucleotides of SEQ ID NO: 68.

209. The adenovirus or adenoviral vector of claim 208, which comprises a nucleic acid sequence comprising at least 121 contiguous nucleotides of SEQ ID NO: 64.

210. The adenovirus or adenoviral vector of claim 209, which comprises the nucleic acid sequence of SEQ ID NO: 64.

211. The adenovirus or adenoviral vector of claim 208, which comprises a nucleic acid sequence comprising at least 462 contiguous nucleotides of SEQ ID NO: 65

212. The adenovirus or adenoviral vector of claim 211, which comprises the nucleic acid sequence of SEQ ID NO: 65.

213. The adenovirus or adenoviral vector of claim 208, which comprises a nucleic acid sequence comprising at least 234 contiguous nucleotides of SEQ ID NO: 66.

214. The adenovirus or adenoviral vector of claim 213, which comprises the nucleic acid sequence of SEQ ID NO: 66.

215. The adenovirus or adenoviral vector of claim 208, which comprises a nucleic acid sequence comprising at least 606 contiguous nucleotides of SEQ ID NO: 67.

216. The adenovirus or adenoviral vector of claim 215, which comprises the nucleic acid sequence of SEQ ID NO: 67.

217. The adenovirus or adenoviral vector of claim 208, which comprises a nucleic acid sequence comprising at least 188 contiguous nucleotides of SEQ ID NO: 68.

218. The adenovirus or adenoviral vector of claim 217, which comprises the nucleic acid sequence of SEQ ID NO: 68.

219. An adenovirus or adenoviral vector comprising (1) a nucleic acid sequence encoding one or more Plasmodium antigens and (2) one or more of the amino acid sequences selected from the group consisting of:
(a) an amino acid sequence that is at least 93% identical to SEQ ID NO: 69,
(b) an amino acid sequence that is at least 80% identical to SEQ ID NO: 71,
(c) an amino acid sequence that is at least 92% identical to SEQ ID NO: 72, and
(d) an amino acid sequence that is at least 88% identical to SEQ ID NO: 73.

220. The adenovirus or adenoviral vector of claim 219, which comprises an amino acid sequence that is at least 93% identical to SEQ ID NO: 69.

221. The adenovirus or adenoviral vector of claim 220, which comprises the amino acid sequence of SEQ ID NO: 69.

222. The adenovirus or adenoviral vector of claim 219, which comprises an amino acid sequence that is at least 80% identical to SEQ ID NO: 71.

223. The adenovirus or adenoviral vector of claim 222, which comprises the amino acid sequence of SEQ ID NO: 71.

224. The adenovirus or adenoviral vector of claim 219, which comprises an amino acid sequence that is at least 92% identical to SEQ ID NO: 72.

225. The adenovirus or adenoviral vector of claim 224, which comprises the amino acid sequence of SEQ ID NO: 72.

226. The adenovirus or adenoviral vector of claim 219, which comprises an amino acid sequence that is at least 88% identical to SEQ ID NO: 73.

227. The adenovirus or adenoviral vector of claim 226, which comprises the amino acid sequence of SEQ ID NO: 73.

228. An adenovirus or adenoviral vector comprising (1) a nucleic acid sequence encoding one or more Plasmodium antigens and (2) one or more of the nucleic acid sequences selected from the group consisting of:
(a) a nucleic acid sequence encoding an amino acid sequence that is at least 93% identical to SEQ ID NO: 69,
(b) a nucleic acid sequence encoding an amino acid sequence that is at least 95% identical to SEQ ID NO: 70,
(c) a nucleic acid sequence encoding an amino acid sequence that is at least 80% identical to SEQ ID NO: 71,
(d) a nucleic acid sequence encoding an amino acid sequence that is at least 92% identical to SEQ ID NO: 72, and
(e) a nucleic acid sequence encoding an amino acid sequence that is at least 88% identical to SEQ ID NO: 73.

229. The adenovirus or adenoviral vector of claim 228, which comprises a nucleic acid sequence encoding an amino acid sequence that is at least 93% identical to SEQ ID NO: 69.

230. The adenovirus or adenoviral vector of claim 229, which comprises a nucleic acid sequence encoding the amino acid sequence of SEQ ID NO: 69.

231. The adenovirus or adenoviral vector of claim 228, which comprises a nucleic acid sequence encoding an amino acid sequence that is at least 95% identical to SEQ ID NO: 70.

232. The adenovirus or adenoviral vector of claim 231, which comprises a nucleic acid sequence encoding the amino acid sequence of SEQ ID NO: 70.

233. The adenovirus or adenoviral vector of claim 228, which comprises a nucleic acid sequence encoding an amino acid sequence that is at least 80% identical to SEQ ID NO: 71.

234. The adenovirus or adenoviral vector of claim 233, which comprises a nucleic acid sequence encoding the amino acid sequence of SEQ ID NO: 71.

235. The adenovirus or adenoviral vector of claim 228, which comprises a nucleic acid sequence encoding an amino acid sequence that is at least 92% identical to SEQ ID NO: 72.

236. The adenovirus or adenoviral vector of claim 235, which comprises a nucleic acid sequence encoding the amino acid sequence of SEQ ID NO: 72.

237. The adenovirus or adenoviral vector of claim 228, which comprises a nucleic acid sequence encoding an amino acid sequence that is at least 88% identical to SEQ ID NO: 73.

238. The adenovirus or adenoviral vector of claim 237, which comprises a nucleic acid sequence encoding the amino acid sequence of SEQ ID NO: 73.

239. An adenovirus or adenoviral vector comprising (1) a nucleic acid sequence encoding one or more Plasmodium antigens and (2) one or more of the amino acid sequences selected from the group consisting of:
(a) an amino acid sequence that is at least 99% identical to SEQ ID NO: 74,
(b) an amino acid sequence that is at least 97.8% identical to SEQ ID NO: 76,
(c) an amino acid sequence that is at least 99.1% identical to SEQ ID NO: 77, and
(d) an amino acid sequence that is at least 99.2% identical to SEQ ID NO: 78.

240. The adenovirus or adenoviral vector of claim 239, which comprises an amino acid sequence that is at least 99% identical to SEQ ID NO: 74.

241. The adenovirus or adenoviral vector of claim 240, which comprises the amino acid sequence of SEQ ID NO: 74.

242. The adenovirus or adenoviral vector of claim 239, which comprises an amino acid sequence that is at least 97.8% identical to SEQ ID NO: 76.

243. The adenovirus or adenoviral vector of claim 242, which comprises the amino acid sequence of SEQ ID NO: 76.

244. The adenovirus or adenoviral vector of claim 239, which comprises an amino acid sequence that is at least 99.1% identical to SEQ ID NO: 77.

245. The adenovirus or adenoviral vector of claim 244, which comprises the amino acid sequence of SEQ ID NO: 77.

246. The adenovirus or adenoviral vector of claim 239, which comprises an amino acid sequence that is at least 99.2% identical to SEQ ID NO: 78.

247. The adenovirus or adenoviral vector of claim 246, which comprises the amino acid sequence of SEQ ID NO: 78.

248. An adenovirus or adenoviral vector comprising (1) a nucleic acid sequence encoding one or more Plasmodium antigens and (2) one or more of the nucleic acid sequences selected from the group consisting of:
(a) a nucleic acid sequence encoding an amino acid sequence that is at least 99% identical to SEQ ID NO: 74,
(b) a nucleic acid sequence encoding an amino acid sequence that is at least 99.5% identical to SEQ ID NO: 75,
(c) a nucleic acid sequence encoding an amino acid sequence that is at least 97.8% identical to SEQ ID NO: 76,
(d) a nucleic acid sequence encoding an amino acid sequence that is at least 99.1% identical to SEQ ID NO: 77, and
(e) a nucleic acid sequence encoding an amino acid sequence that is at least 99.2% identical to SEQ ID NO: 78.

249. The adenovirus or adenoviral vector of claim 248, which comprises a nucleic acid sequence encoding an amino acid sequence that is at least 99% identical to SEQ ID NO: 74.

250. The adenovirus or adenoviral vector of claim 249, which comprises a nucleic acid sequence encoding the amino acid sequence of SEQ ID NO: 74.

251. The adenovirus or adenoviral vector of claim 248, which comprises a nucleic acid sequence encoding an amino acid sequence that is at least 99.5% identical to SEQ ID NO: 75.

252. The adenovirus or adenoviral vector of claim 251, which comprises a nucleic acid sequence encoding the amino acid sequence of SEQ ID NO: 75.

253. The adenovirus or adenoviral vector of claim 248, which comprises a nucleic acid sequence encoding an amino acid sequence that is at least 97.8% identical to SEQ ID NO: 76.

254. The adenovirus or adenoviral vector of claim 253, which comprises a nucleic acid sequence encoding the amino acid sequence of SEQ ID NO: 76.

255. The adenovirus or adenoviral vector of claim 248, which comprises a nucleic acid sequence encoding an amino acid sequence that is at least 99.1% identical to SEQ ID NO: 77.

256. The adenovirus or adenoviral vector of claim 255, which comprises a nucleic acid sequence encoding the amino acid sequence of SEQ ID NO: 77.

257. The adenovirus or adenoviral vector of claim 248, which comprises an amino acid sequence that is at least 99.2% identical to SEQ ID NO: 78.

258. The adenovirus or adenoviral vector of claim 257, which comprises the amino acid sequence of SEQ ID NO: 78.

259. An adenovirus or adenoviral vector comprising (1) a nucleic acid sequence encoding one or more Plasmodium antigens and (2) one or more of the amino acid sequences selected from the group consisting of:
(a) an amino acid sequence comprising at least 89 contiguous amino acid residues of SEQ ID NO: 74,
(b) an amino acid sequence comprising at least 247 contiguous amino acid residues of SEQ ID NO: 76,
(c) an amino acid sequence comprising at least 230 contiguous amino acid residues of SEQ ID NO: 77, and
(d) an amino acid sequence comprising at least 231 contiguous amino acid residues of SEQ ID NO: 78.

260. The adenovirus or adenoviral vector of claim 259, which comprises an amino acid sequence comprising at least 89 contiguous amino acid residues of SEQ ID NO: 74.

261. The adenovirus or adenoviral vector of claim 260, which comprises the amino acid sequence of SEQ ID NO: 74.

262. The adenovirus or adenoviral vector of claim 259, which comprises an amino acid sequence comprising at least 247 contiguous amino acid residues of SEQ ID NO: 76.

263. The adenovirus or adenoviral vector of claim 262, which comprises the amino acid sequence of SEQ ID NO: 76.

264. The adenovirus or adenoviral vector of claim 259, which comprises an amino acid sequence comprising at least 230 contiguous amino acid residues of SEQ ID NO: 77.

265. The adenovirus or adenoviral vector of claim 264, which comprises the amino acid sequence of SEQ ID NO: 77.

266. The adenovirus or adenoviral vector of claim 259, which comprises an amino acid sequence comprising at least 231 contiguous amino acid residues of SEQ ID NO: 78.

267. The adenovirus or adenoviral vector of claim 266, which comprises the amino acid sequence of SEQ ID NO: 78.

268. An adenovirus or adenoviral vector comprising (1) a nucleic acid sequence encoding one or more Plasmodium antigens and (2) one or more of the nucleic acid sequences selected from the group consisting of:
(a) a nucleic acid sequence encoding an amino acid sequence comprising at least 89 contiguous amino acid residues of SEQ ID NO: 74,
(b) a nucleic acid sequence encoding an amino acid sequence comprising at least 286 contiguous amino acid residues of SEQ ID NO: 75,
(c) a nucleic acid sequence encoding an amino acid sequence comprising at least 247 contiguous amino acid residues of SEQ ID NO: 76,
(d) a nucleic acid sequence encoding an amino acid sequence comprising at least 230 contiguous amino acid residues of SEQ ID NO: 77, and
(e) a nucleic acid sequence encoding an amino acid sequence comprising at least 231 contiguous amino acid residues of SEQ ID NO: 78.

269. The adenovirus or adenoviral vector of claim 268, which comprises a nucleic acid sequence encoding an amino acid sequence comprising at least 89 contiguous amino acid residues of SEQ ID NO: 74.

270. The adenovirus or adenoviral vector of claim 269, which comprises a nucleic acid sequence encoding the amino acid sequence of SEQ ID NO: 74.

271. The adenovirus or adenoviral vector of claim 268, which comprises a nucleic acid sequence encoding an amino acid sequence comprising at least 286 contiguous amino acid residues of SEQ ID NO: 75.

272. The adenovirus or adenoviral vector of claim 271, which comprises a nucleic acid sequence encoding the amino acid sequence of SEQ ID NO: 75.

273. The adenovirus or adenoviral vector of claim 268, which comprises a nucleic acid sequence encoding an amino acid sequence comprising at least 247 contiguous amino acid residues of SEQ ID NO: 76.

274. The adenovirus or adenoviral vector of claim 273, which comprises a nucleic acid sequence encoding the amino acid sequence of SEQ ID NO: 76.

275. The adenovirus or adenoviral vector of claim 268, which comprises a nucleic acid sequence encoding an amino acid sequence comprising at least 230 contiguous amino acid residues of SEQ ID NO: 77.

276. The adenovirus or adenoviral vector of claim 275, which comprises a nucleic acid sequence encoding the amino acid sequence of SEQ ID NO: 77.

277. The adenovirus or adenoviral vector of claim 268, which comprises a nucleic acid sequence encoding an amino acid sequence comprising at least 231 contiguous amino acid residues of SEQ ID NO: 78.

278. The adenovirus or adenoviral vector of claim 277, which comprises a nucleic acid sequence encoding the amino acid sequence of SEQ ID NO: 78.

279. The adenovirus or adenoviral vector of claim 1, wherein the adenovirus or adenoviral vector requires complementation of a deficiency in one or more early regions of the adenoviral genome for propagation and does not require complementation of any other deficiency of the adenoviral genome for propagation.

280.-284. (canceled)

285. The adenovirus or adenoviral vector of claim 1, wherein the adenovirus or adenoviral vector comprises a nucleic acid sequence that encodes one Plasmodium antigen.

286. The adenovirus or adenoviral vector of claim 1, wherein the adenovirus or adenoviral vector comprises two or more nucleic acid sequences that each encode a different Plasmodium antigen.

287. The adenovirus or adenoviral vector of claim 1, wherein the Plasmodium antigen is selected from the group consisting of circumsporozoite protein (CSP), SSP1, and CelTos.

288. The adenovirus or adenoviral vector of claim 1, wherein the Plasmodium antigen is AMA-1.

289. The adenovirus or adenoviral vector of claim 1, wherein the nucleic acid sequence encoding the Plasmodium antigen comprises codons expressed most frequently in humans.

290. A composition comprising the adenovirus or adenoviral vector of claim 1 and a pharmaceutically acceptable carrier.

291. A method of inducing an immune response against Plasmodium falciparum in a mammal, which comprises administering to the mammal the adenovirus or adenoviral vector of claim 1, whereupon the nucleic acid sequence encoding the Plasmodium antigen is expressed in the mammal to produce the Plasmodium antigen and thereby induce an immune response against Plasmodium falciparum in the mammal.

292. The method of claim 291, wherein the mammal is a human.

293. A method of inducing an immune response against Plasmodium falciparum in a mammal, which comprises administering to the mammal the composition of claim 290, whereupon the nucleic acid sequence encoding the Plasmodium antigen is expressed in the mammal to produce the Plasmodium antigen and thereby induce an immune response against Plasmodium falciparum in the mammal.

294. The method of claim 293, wherein the mammal is a human.

295. The adenovirus or adenoviral vector of claim 89, wherein the adenovirus or adenoviral vector requires complementation of a deficiency in one or more early regions of the adenoviral genome for propagation and does not require complementation of any other deficiency of the adenoviral genome for propagation.

296. The adenovirus or adenoviral vector of claim 186, wherein the adenovirus or adenoviral vector requires complementation of a deficiency in one or more early regions of the adenoviral genome for propagation and does not require complementation of any other deficiency of the adenoviral genome for propagation.

297. A method of inducing an immune response against Plasmodium falciparum in a mammal, which comprises administering to the mammal the adenovirus or adenoviral vector of claim 89, whereupon the nucleic acid sequence encoding the Plasmodium antigen is expressed in the mammal to produce the Plasmodium antigen and thereby induce an immune response against Plasmodium falciparum in the mammal.

298. A method of inducing an immune response against Plasmodium falciparum in a mammal, which comprises administering to the mammal the adenovirus or adenoviral vector of claim 186, whereupon the nucleic acid sequence encoding the Plasmodium antigen is expressed in the mammal to produce the Plasmodium antigen and thereby induce an immune response against Plasmodium falciparum in the mammal.

299. A composition comprising the adenovirus or adenoviral vector of claim 89 and a pharmaceutically acceptable carrier.

300. A composition comprising the adenovirus or adenoviral vector of claim 186 and a pharmaceutically acceptable carrier.

301. A method of inducing an immune response against Plasmodium falciparum in a mammal, which comprises administering to the mammal the composition of claim 299, whereupon the nucleic acid sequence encoding the Plasmodium antigen is expressed in the mammal to produce the Plasmodium antigen and thereby induce an immune response against Plasmodium falciparum in the mammal.

302. A method of inducing an immune response against Plasmodium falciparum in a mammal, which comprises administering to the mammal the composition of claim 300, whereupon the nucleic acid sequence encoding the Plasmodium antigen is expressed in the mammal to produce the Plasmodium antigen and thereby induce an immune response against Plasmodium falciparum in the mammal.
